United States Patent Application Publication US 2026/0275333 A1 - sequence listing, part 7

SEQ ID NO: 3045 - RNA, 64444167 nt, Homo sapiens (residues 12,888,835-15,036,973 of 64,444,167)
  source 1..64444167: mol_type = mRNA
aactaaatcttggactttcgttctgattcaggaagttgccagacactctcactgccacccaccctagccaaaaaagcaaaaagtaagctctaaatcattttacaacccattagagagctgacgacactaagaaacctaaatgaaataaaatctagaaattaacaaacacttccaaggagagaagacactcaagattgctgtgtccccagcagagtgatgggaagaaaaggactcctctatagacagaaacctgaactacgagaaacgctaaaagacatgttaccggctgaaggaaagtattagacagaaactcagattaatagtaatgaacaaggagtaccaaaaagggtaaacataaaatacttttaaattatctgtattatattataggaaatttatttaaaaggctattgaccaaaacaaaaaatttaatgaaagtatactgtagggtttatagcatataatggtaaaataaatgacaacaagtgcataaaggctagaagagaagcaaatttagtggtactcttacaaatcattacaggcatgggaaggcatataactgtgacaattaaaattttttattattacacagaacaactatttttaaattatgtaaatatgtagagctaagaaaaataaggagactaggtaaaatggaatagtggggggaaaaaacttcatttatccaaaagatgacaggaaatgagaagcaaagcaaaaagcaaaaaaggtgagagaataaaaatgaatatcaaggcaatagacataaactcaacaacaataataattacattaaatttaagtgggaagaaaagaccattgaaaggcagagactgacaaaacaaaaagtaagatccaactatttaatatttgtggtctaagagaatcctctaaatataaagacacaaacagattgaaaatgtaaggtgggaaaaggatctaacaagtaaacttaaagcaaaggaaagctggctataatattagtatcagataaagtaaattttaaagcagaaagtatcacaagagataagaaaggacgtttcacaatgatgaaagaagaaattcatccagaagacataatctcaaattatgcatcaaataacagttcttcaaaatacattagtttattaagcaaaaactaacacaactgaaggaagaaatagtcaaatctacaatcctaatcagagatctaggcaaaaagatttacaaggtttatacgtgataaaggacttatatagaaaacatatcaaaatctcttacaactcaataagaaaacagaaaaaaatccaatttaagatatgcacaaaagacttaaatagacacatcataaaggaagatacaacaatgcccaataaacacatgaaaagattctcaccaccattactcatcagggaaatgaaaattaaaaacgcagtgaaatgtcactctacacctactggaagagctaaaatccacaaggcaaggatgtgaaggaactgaaactctaataaattgttgattggaggtaatatatcataaccagtttggaaaacaatttgccttataacccaataataccattttcaggtatttaccaaggaggaaagaaaacatctgctgaaaacaaagcagctttattcatagtagccaaaatctggaaacaacccaaacgtctatcaccaggtaaacatgtaaacaaattgtggatgttcatgcaatggaatgctagtcagcaataaaaagaacaaactactgagacacacaacatgaatgaatctcaaaaaacatcacattgatcaaaagaagccaaatgcaaagagattgcattgtgtgatgccatttataggaaactcaagaatgggcaaactaagctagtgatagaaattaaaaaacagttgcctctagagagggggaggtagaattgctagaaaggggcatgaagggatttgctggagtgatagaaaatggtcaatagcttgttggggatggtggtcatgaatgtggaaccttgtcaaaactcatcaaacagtaagaatagtaaaatttcttcattttactttatagtatgcaaatcatacctcagatcaaaaatagaaaaattcaaacattaaggaacttgaaatctttacgtcaatcaaatattgcttcaataatgttgatgtggtttggctgtgtccccacctaaatctcaacttgaattgtatctcccagaattcccacatgttgtgggaggcacccagggggaggtaattgaatcatgggggctggtctttcccatgctattctcttgatagtgaataaatctcatgagatccgatgggtttatcaggggtttccgcttttccatctctctcattttctcttgccgctaccatgtaaaaagtgcctttcatctcctgccatgattctgaggcctccccagccatgtggaactgtaagaccaattaaacctctttttcttcccagtctcaggtatgtctttatcagcaacatgaaaatgaactaatacaaatgtcaagtaccaaacaattccaaaacttagtggtttacaacagcaaacatttgcttctgctcacaagtgtgcaggttgaccagtagtacttggggactcatcttatctggaggctacagcagccacccagggcaagttcttctcatggcactggcaaaagcagaagagaaataagcagtgacagcccttagagcctcagcttgtaactagcaacctgtcatatccaccttccattggccaaagcaagtcaactgaccaaggccaaagccaatggaccagaaaagataccttacccccagtgaacaatggcaagagtggagagggaggaaaaacttaggacatacaatacaatctcattaatccaaattagtgtgagaggtgaaacagaaactgggtctccggacaacaagctcagtgcctctgcctcaggccacgctgtctccacattgtctggaagccaacaagctggactccagctgtgttccaggggaaagttccagcacatcttcccactccctgacagggaagggtgataagcccagaataccacagtgctccatacagatataagatagaaagcctcactttggttttcctaatgtttgttccccacacagtctagaggctgactctggggagcaacggagctcaccccttgcattgggagaagaaacatttgttaatggaaagaaatgcaatacagccatctaatggatcccagatatcataggcctacctactgcttccctgcgaacatctgaagtaaatcacaacataaagggctgttgtgtttgtttcacctgggtagtttcaatttgagcaaagatgggcaccctcaagggtggggagcagcaggtgcatgagttctgtcactggatgtggttaatggcttgcagcaggtgcttttcaccttttgggggataaatattgagcccatccccagcttaaacagccaaggagatgagatgtaattctgttccaagaaatgagtagaaactaaggccaatttttgcccacctacaaggggaaagactgtgatggtcatttcttctgcacatacttatataaatcaaccagaaattccagtctcaatgttccttttgctcatgtcaaaccattttctccttgtgaacacaaagtaagcatagcaaaggcctccagggtcaagctcccttcccacaaaattatggtctgaccctggcaagtgacctgagcttcctcaagttctcctgacttgagacatttgtccacattccagtcaactgaagaagtaatttgatctcattcactcttccaacaatcaacaattgctcacctgccaggtgtcaggaactctgctgagctctggggacaaagatgtaaataagaaaaccatggtcccttccttcccagagcttgtacaggaggagacaagaccgacagagactaaacagctccggtgtggtaggagttaggaagctgaactgcacaggtgccttctgagcctcctgagccaccttaaggactcacacattaaccctaaggcagaggggagtcatttaagaagcagcagtctgcggccaccggctgaggctgcagtattttttccaagaaccgctgtgtatcaaaatgacgctgcagcttccacagccctcagggagcttcatcccgctctgcagggtttcaagctggagagccttcagatgcacttaaatttttacaaatgccgtaagtggtgaagttgagggtggatgcattctctctggccacaccccacagagattggaaacagcctttaggggtctcaggagcgtctgactgaggggggtagtggtcccagagaccgcacacaggcccctcttacactctcacacctctcaaagactgagaagaaaaaaaccaccctcacattgtgatgcagcgtcttccttgccaggccaggtgtttcttgaaaaatcaccagagggattcttggttaacacccaggctctacactcagcccgctgtgtggctttgggaaaatgacttaaatcttcatctccttttcagttttccattaaatgagtaaagcaaacttgaaagtctggggcctctctgacattcatgaactatcatgggaactctggtaatacaaaataaaataaaataaaagtgaacttcgcttggaaaatgtggctggaaagatatcttatagtttcaatcagttattcctcagaaggcttgtctatgtaatagcttaggaccaggaccacacaaaaacagtaacagtggtgtgtttttttggggggtggagggaggtcagagagttagggtttgtcccttgcctagaatgttatatttagaagaaactattattagccaaaatttggtatttggaattatatttataaaccaacacacacagttcgggcatgtttcatttagctccctaagtatgaacaggattgcccgggtcagatatggaaagtgatttatggtaatgtgtgcagagaacgaggaggcaggcggtattggagcctcagaggggcttaggagcttgacaccaaaccagtggaattgattaagggagatttcatttcctctgactgtgtgggaactctatcagagagggcatttggggaaatgattcttataatttgttcccagagtaacccggaataacagttttgccttgcagctgaaacagcccttcagggaaaggcccatcatgccaaggcagtgtcagaattttcctccaagccggctctgctcatacctcaggctgggagcgaggtctacaccaaagtgtgggatgggtcaggggctcggactccttggcccccacttcccaccctcagcactctgcatatcagcaacatgggaaaagcaccagaggtgattcattacatctgccaagagttgatccagaataaaggaccataccctcacttctgtttaaaggctccaggccagcctcgcctctgggtttatgcacagggttttactctgatgtcagaggacctgaatgtgagtacacgcacgtgtgcatgcgcgcatacatactctccattagcatctgaattctcctcttccctttcttcttctaccaaatattaggcagcttctgttacattctggacacttgatctcgtagtcaaggtatcagtttggagatggtgtttgaaatgggtgtaaaccagctctcagtgggaagtgacctggataaggagaagagggtgtgagtatttgaagttctctcagttgagggggaatcaatgggaaccttgtgaaatcattagcggaaatcccaaaggcactcaggactgggtcactaatcatttcatatctgggatcaaagattcaaagtcttttatttttcttcatctgcctttgtttttaaaccaagtagagagaatagggaggacaacttactctatgacaaaagaagaaaatgtttttctgtaaaagaaatgtgttatttcttgaatggtcagcaagattatacacagtggcctcctcctgtccaggggaaaagccagccagcctcaggccttaccacgtgtagaaggaggaacagcagtccttcaaagatgaccacatcctaatccctggaacctgtgactatgttgctttacacaggtagagactttgaagatgtggtaaagtcaagcatcttgagaacagaagattcctctgggttatctgggtggacccaatatcatcacaagagtattcataaggaggcaagaggggtaagagtcagaagaggagaaggctgtgtcatgatggaagaagaggtgtacagagccagagggaggagatgctaagaggccatgagccaaggaatctaggtgacttctagaagctggaaaaggcaaggcaatagattctcccctagagcctctaggtggaattcagcccttcagcattttgattttagacttctgacctacagactgtaaatgaaatttttgtcttaagccactgcatttgtgataattagaacattaataggaaaatgatagaaactgataagaaactaagatactatgttactataagaccatttggcttccagctaccagcctctgctttgctttctgagaccactcgtgcctgtggcatgccagaagtgcttgtagagtgactgtcaccacctcctcccaagggctatcaaacaatgactgatgggagctggtgaatacaaatcccagctcccttgcccttgggtggaataactttgcagtgtgggttctacacaagctctccaagttccccaatgggattaagctccaggtgcccagtggcagcggggttggttagcctggttaccagctgccttctcttccctgtctcagtttcccagtgccctccaggtgcctcctgggatcatcttccaaatatactacttgtgcttgaatccttgtctcatggtcttcttctcagggaactctaagttggaatatgaccagagccctgctctccttagctggaatcactcacttgagtcaaatgactcaagcaagaaccaccagacagccatagcatggaacataaaacccaaatagacagacaagtggccttaaacaaaagagtgctcagtcctgtggcagcctcctgaccaagctgctcccacctggtttctctcagtctccacctgtcttacgttctgtgagcttcccaatgaaccacgttctcttaagttacccaaagttaattcctgtaaccaactttgtgatcaaaaaaccttatcagacagagaattatggaaggagtgaagggagaaggtacacttttggaaaaacagaatgggaactgtgccccaagagtagaagacacataatcagacttaataccgagcagactggaataaacatcggctttcagtgtttctcaaatggaagactccaaggcatccattctgccctttctctgccagtgtcagcccctccctcaggaaggacaatatctaggtgaggccacatgatttttctatgaggattgactgaacatgggattttggtcatttaaatcttgggtgaattatttaacgagcagaaatgcaggtgcccaggagatcttccctttctattacgcaatgagtggaggtgatgggaacccctttttctgttgttttgggtagacccatgatagactgagctcatgatatgtagggcttgatccttggtatcagaaaaaaataataggggagagaagcacagctgttatcatcaagaaacctgtacaagactcattcattagtttatggacaacaatgaaatatgttgaaataatgcaaatgacacttagattctagagacctgatttctagttcagctagtaacagtaaactttggcaagcaacttcacctctctgtagtctccattttcttcaattgtcaagtgattggacaatgtgattactccatggccttatgactatagaagaacatcatattggggtgatccagtgccagcaaacctatcacggccaactgttatggtcatgaaattaagtaagcgtatttcctccaatggcctgcatggttgcttcctcatcatacccagcctccagtaacctgggagtttaaaactaggaatctaattattttctttcaacatgaaatagaggccgaagaaatggaggtacagctctaagcttaatttcaattccaaataacatagaccagtgttgtaggtgaatgtatcagctttgaaagagaaaaaaagtttaaaaaatcttattcttcattaggtatagaatgaaaacatttctattccctccagaaagcaagggcatttggcttctaaagctgctttaaaagaaatatgttcattttggagagacataagctaactactttccataaaattgctacttcttaggactgtagctaaaacctgtaatctgctgaaccaattcatttagcaaacattttgagcacttgctataccccagacacagtcaagtagtggaatacaaagctatataatatttaaagttctttccttatcttgggagtatacgttctaagatccccaatggatgccagaaaccgtgaataatattggaccctaaagatcatataattttttcctacacatacatacctataataaactttaattcataaattaggcagagcaagagattaacaacaataactaataataaaataaaacaattgtaacaatatactgtaataaaagttacgtgaatgtggtctccacgatctctttcaaaatatcttattgtactgtactgcacataactaaaatcatagaaaataaaaccatgaagaaggaggtactagtgtaatctcttttatctgaaaactcacatctatttatttagtgcacaactacattctgggaacttattatgtcctagaaacaaataaaacataatgaacaaggcacagtctctgccttcaggtggctcccatgccagtggccaaaagggtcaagaataatgggctattcttatactttagagagacagatgtatacgcacaagattctggtctaaattcctgcataattttacttttattttcatttaaatttcaccaaaatgaagaacattgatatcaatttctccttcccaaatgacagtacttcttgtgttcaaattccatttaagtcccagcaaggttcaaaaaattactttgtgatctgtgtaattttagattgatggagcaatatttgtatgtgatttgttaactcctcatctcccatttactagctgtgcaacatcaagcaagttgcctcacttctctgtgcttcctttttacacctatttcacattgaggtgaggagttgctacagcaactaaatgagttaatttatgcaaagcacttaaaacagagcctgctggatatatcccaagtttacaacaaaagttaaatattatttttgaatgtttgaatttcagacattcaaccaaaatgggcagtaaactaatttctaaggactacatgtctattgactatgaaactttctgtattagttatccattgctacgtaacaagccaccccaaaactctgtggcttaaaacaataatcacggattacttcatgatttctgtgagacagaaatttaggagcagcttagctgggcagttctgcctcagggtctctcacgacatcgcagtcaggtggtgactgagactggggtcatctcaaacaggtgtgggctggaacaactcgccctgtctccatgcagtccccccacaaggcctgacaagcatgggagttgcaggtagccagacttctcacacagtggttcagagctcccaagtctcatggacagagaaagagagagagagaaagtaagagctatatcacttttgagaatcaaaccacagaagtcacatagcatcacttccaccataatctgtggtggtaacaagccctcccccgatccctacccagattcaagaggagggaatgtagttccacctttcagtgggaggagtggttgtcacattatgagaagagcatgtaagacgggagagagatgataggtagataggtaatagatcgatagagagagagagagagagatggatgatagaactttgttagctttattgatgtataattgagaaataaaaaatatacacttaaaatatacaacttgatgttttgaaaagtggacacattgtgaaatgataaccacatcatatttatcacctcatatagttaacatattcttttctttttctcctttttgtggtgaaaacacttaagacttacagtctttgcaaatttcaagtatacaatacagtattgctatggtcaccacgctatacatttgatcttcagaacatattcatcttgaataactgaaatgctgtaccctttgaccaacatcatcccatttacctctccctcccagcccctgacaaccattagtctattctctacttctataaatttgactattttagattccacatataaatgaggtcatgtggtatttgtctttctgggcctggcttactttacctggcataatgtcctccagtttcacccatgtttttgcaaatagcacaatttccttcttcataaagctgaataatatttccttgtgtatgtatacatatgcaacattttatttataaattcatccatcaatagacacttaggctgattcctttgcttagctattgtgaataatcctgcaatgacatgggagtatagatgtcgctttgacatactgatttcctttcctatggatgtatacccagaagtgggattgctggaccttatggcagtttgtctctaattttttaagaaatctccacattgttttccataatggctgtagcagttgacattcccaccaatagtgtacaagggttgccttttctgcacatcttcaccaacacctgttatcttatagctttttgataatagtcatcctaacaggtatgaagtggcatctcattgtggttctgatttgcattttcctgatgatttgtgatattgagcactttttttatattgctgttgaccattagtatagcttcttttgagaaatgtctgctcacattcttggtccttttttttttgaaatgatgtcttgctctgtcacccaggctggagtgcagtggcatgatcttggctcattataacctccgcctcctgggttcaagcaattctcctacctcagcctcctgtgtagctgggattacaggcgcctgccaccatgcccagctaatttttgtattttagtagagacgggttttcaccatgttggccaggctgctctcgaactgcagacctcaggtgatccacctgcctgagcctcccaaagtgcagggattacaggagtgagccaccgcgcctagcctcttgaaccatttttttaaattaggttttttgtttttagacagacatcaactccgacgatgaaaaattaacaggagatctatgaaactcggtaccaagctgtcctccacaacctaccaaagccagagggtggaagaagggacaaatgtcagctgcagcaggtgtcctggtgaagcccctgatacctgggcatggggcaccttcatctgcactgccctgaggaactgtgagctgttggagatgccagcaagcttggctgtgtgctgtggtgaacatgaatgtgtaccggaccctgagcaaggcaggcatggccctgatttcacagtactagggaatcagtctgtgacaatggtcactgtttccttctgggtgagtcttaatacatctaatggccaaaatgcaggtgccaggagcaagagagctttgttttgtttgctgatgaataccctgatgggcctagataagttactggcccataatgtgccctcaataaatatttgttgaatgaatgtatacttcaaagtcccaatataaaccattgatccttacaaggggcttccctgttctcctccctacgtgtgaagaaagaaggatctacttccacagcttgcaataatgataaaagtcatttaaagacttctttaaaaataactcatttgaaaaaaagaaatcaagactcaattggcatcttgtccctcagagcagagcaatcaagctagggctgccctctgtggctgcagagggactcccttcaatccagagccaccagagcaatggaaaagaaacaggataattgaatgcctggcccaggcttcattgcagtgtttggtctctgtcgagccaccgaggagaactctgaaggccaatttgcaggttgatgcttggggtcaggtgtggggcttttctgccaggaacgaaactcagcgataatttggggcctgactcaggacctgattctgatcctatcttgcttctcttcctcctaagaagtctgccctgtgcaggggacctgaggagaatagctgctaatgagcccagtgccattttgggggctttgcgttctttattgcaaggtcacccagtggtactctatattctagagcccagccacagcaccgtgaaaaagagccagagaagaagcccattggttgttgcagggcgaaccgcgagagtgccaagcatccaaatacggaagaggaataaaatgaatcctgccattggtggcacatatagccaggcctgctgttgtcaggttaaagtcaggccatgtgccatataatgtcaaccaaacatttccagcacctggttgacctcacattcatagccacgcacacgaaaacacatctacacacagagaggggaacaccgtgctcactcaaagctgagatgtttgtgtcagccctgagcaagtgagctgagggtagctataatcagaccactgggacttatctcagcagttttcaaggcaatgccttgacctttttaaaagattttttttcttttttttttttttaaatagagacaaggtctctgtatgttaccaagtttggtctcaaactcttgggctcaaatgctcctcctgcctcggcctcccaaagtcctgagtttacaagtgtgggtcaccacacctggcctgccttcaccttttaaaaaaaagcagaagacattttgctacatgcaaataaataaataaaagcagagtaagaactgggaaaccagcctgacatcctaagccatgtgaaaattatattttcacaccgtgaattcaagtctttcagagaagtagaacattacagaaagatctctacaactcatatgatacctcctcagccttaataaagtacctaaggaatgtactacagggtgctgatttcttcttagtttattgcaaaaactccccatccaaattatttgaggagaatgaacttttttagtgtttgtcttaaaggacaagatcacttgagggaaatccgaaatgtcagatttgttcaagcaatatatacttgaggctgggcacagtggctcacacccgtaatcccaacattttggggggccaaggtgggccgatcgcttgagcccagtcattcaagcccagcctgggcaacgacatagtaagaccctgactctacaaaataatacaaaaattagctgggtgtggtagtacgcacctgtagtcccagctacttgggaggctgaggtgagaggatcacttgagtccagaaggaagaagttgagcctagatcatgccactgcactccagcctgggtgacagagtgagaccctgtctcagaaaaaaaaagatatagatatatatacttgatttgggcacatttttgaatttagggatgaatatagatattttggatgctaagaattcataccttagagaagaaaaagaaagaaactaactgaaacccaatggtgaaagggcagcctaccctgcttcctccacctttcaatgactaggaacaaatctctttctctttctttctcaaaaaaacaaaaaaaaaacaaaaacaaacaaacaaaaaaaaaacttatggagtcaggagtacaagggcaattttactacatggataccttgcatagtggtaaagtctgagcttttagtgtacccattacccaaataatgtacattgtattgtgctcaacaggtaatttctcatccctcatctctctcccaccctcccacattttcaagtctccagtgtctatcattccactctctacatccatatgtatatgttatttagctcccacttataagtgagaacatgtgatatttgattttctgtttctgagttatttcagaaaaatagggcctcaaatttcatctatgttgctggaaaagagacgtgatttcatccttttttatggccacatagtatgtcatggtgtataggtaccacattctctttacctaatcatccattgatggacatttgattccatgatttttgctattgtaaacagtgctgtgataatcatgagtgcaggtgtctttatataaagctttcttttcctttgggtcgatgcccagtattgagattgctggatccaatggcaagtctatttttagctctttgcaaatctctttctcttaacactttcatacctcagtggcttccaaactctgtgaatagtggaatccctttttcaaatgaaagtttacatagagccccaaatacaaagaagttcaaggagagtggccgtgggaagcagatgaggacttacgagtctgcatgtatcccagctcctttctgctgtcacccccaaaacccctcatacatgtcctggatactccatggaacatagttttagtgtctctgcacaaatatacaaaagtaatctcggtggagggaaaaaacattttttaagttagttttacacttttttttcaaacttatttttaaaaaatagcaatgtgtctttcccaaatttagtatccattaggaaagaaagagtctaaattttaagtgtatatgtgaatttcacagggagtcagacttaatattctcaaaaccaacatctctggggaaagcataagccatggtaagaggtatatttgaggatccatagatagttcatgatagatagtgataatcattctttctattttggacactacgttgtgttaacctttatccatgaggtaaacgggtggatggaaaaatctatagagtcatttaagtttgaaaaaggaaagaaacttcaagttgcagcttccctatttagtattagtagacatgataggtaattttttgagtgtcaacttgactgagtcatgggatacccagataacaggttaagaattattttccactgtgtctgtgaagttatttccagaagagactggcattcaaattggtgggctgagtaaagcagattgccctctccagtgtgggtaggctttatctattccattaagggcctgaatggaacaaaaaggcagaggaagattgaactcactctctctcggcctgattgcttgagatgggacttggtctttccctgcccttagctctctggttcccgggccttcggaatggaactggaacctacatcattggctctctggttctcaggtctatgaatgaccatcagctttcctgagcctccagctatcagacagcagatgtgaaactttccagctccataattgcataagtcaatatcatatatatatatatatagtcatgtgccacttaatgacgttttggtcaatgacaaaccgcatttacaacagtggtcccataagattataatggaactgaaaaatttctatcatctaataacatcagagctattctaacatcatagcataatgcattactcgtttgtgatgatgctgatgtaaacaaacatactgagctgccagtcatacaaaaatctagcacatgcaattatttacagtacataatacttgattgtgatgataaatgactgttattagtttaggtatttattaaactatacttgtactgttattttagagtgtactccttctatttattatttaaaaagttaactataaaacaccctcaggcatgtccttcaggagtttccagaagaaggcattatcatcataagaaatgacaactccgtgagtattattgcccctgaagaccttccagcaggacaaaatgaggaggtaaaagacagtgatattggtgattctgatcctgtgtacgcctaggttaatgtacagatgtgtgtcgttttaacaaagagtctaataaataaataattaattaatcaattaaagctcactttgggaggccgagatgggtggatcacttgaggtcaggagttcaagaccagcctcgtcaacatggtgaaagtctgtctccactaaaaatacaaaattagctgggcgtggtggtgcacgcctgtagtcccagttactcagaagcctgaagcatgagaatcatttgaacccaggaggcagaagttacagtgagccaagattgcaccactgcactccagcctgggtgacagagcaagactctgtctcagaaaaaataaataaataagtaaataaataaagtttattgaataaggatataaagaagatatttgtgtatagttgtacaatatctttgtgttttaagctaatgttacaaaatactcaaaaagttaaaaaaattaaaagtttgaaaagtaaaaagttacagtaagttaaagttaatttattattgaataaaaatttaacatatttaatgtgtcctaaagtttatagcatatagtaatgtcttcggatttctcatacactcaccacttattcactgacttatccagagcaacttatagtcctgcaagctccgttcatggtaagtgccctacacaggtgcaccatttttttttttttttttttttgagacagagtttaactcttgttgcccaggctggagtgcaatggcacaatcttggctcaccacaacctctacctcccaggttcaagcgattctcctgcctcagcctccctagtagctgagattacaggcatgcacatgcaccaccacgcctggctaattttgtattttcagtagagacagggtttctccatgttgatcaggctggtctcgagctcctgacctcaggtgatctgcctgcctcggcctcccaaagcgctgggattataggcgtgagccactgcgcccggccaggtgcatcattttttatcttttgtagtatatctttttatcttttcctgaactctctcgatgattagatatgtttagatatacacacacttagcattgtgttacaattgcctacagtattcagtacagtaacaggacgtacaggtttgtatcccaggagcaacagactatgccatatagcctaagtgtgtagtaggctgcaccatgtaggtttgtgtaagggcactctatggtgttcacacaacaacaaaactgcctaatgatgcctttatcagaatgtagcaacatcattaaatgacacatgactgtataggcatcctatttgttctgtttccctacagaaccctaatacagtagataaaacaaagaaggtcaggaaaattgggggatgagtcaaagtacaggaactagttagagatactagaggagactgatcaaatcagaccacaaagttatcagttaagaccccttctgactacgagcccccagatgtggagatggagtcttaaatccccaggaatcagtgcagggcggctgcatttcttgaaagatcagtattcctaacttgattcatgcagaactcacataagattaactctgacacagtgcagctgttgtgttttgttttctctctcaaaggggtgcacggtgtggcaatcactttgttcatatttttgaatttcttgtgagtaaaatgaattcagggcacttcattaactttcttagcagaagaagtcaatatggttacctgtaagtaattagtcaacctggagaacagttcacggctgattgaccagcaagtgaaagatttaacataatgggcaaaaagagtactagggcagcagtcctgggggcctgggctcagatttcacctctgtcactcactctgtgtctcagtacagatcccaaccatatacctccactgctctgagcttcagtttcctcacctacaaaattcaaggctgggagaataatatttatgtcatgagcttataagggttttttgagaaataaatttaaaatatatataaaactggcccggcgcagtggctcatgcctgtaatcccagcactctgggaggccgaggcacgcggattacgaggtcaggagttcgagaccagcctggccaacatgatgaaaccccgtgtccaccaaaaagtttaaaaaattagctgggtagggaggcgcgcacctgtagtcccagctatccgcgaggctgagacaggagaatcggttgaacgtgggaggcagaggttgcagtgagccgagatcgtgccattgcactccagcctgggcgacagggtgagactccatctcaaaaaaaataaaataaaataaaataaacaaacaacaacaaaaaatatatatatatgtaaaactttcttacatagagcctagaacatactaggagctcaataaattatacccatcataactaattaaaaataaagagtatttttcccccattaaccagtagtgggaataaatgacaactaagagtgaagaagagataagaccaagaaagaccaagtaaaatgaagcagcaagctaagatcctttaaagcagggccctccttgtcaaaaagatgcctcccacatgacttcatggctgtagtgggcatgtgccatgtatgtgactacccagcttgtttgacgtggcctttctattttttggataatttctcctcttttaagtctgccacccttaggtaggagctataatcatttatttgcttgtaattatggcatggacatgtgacctcaaccccattccatcacacattcccaacttggacttggaagagaaagcagttgccatggggaacccattctctgctgagggtgaataattgtggcagagagaatgcctgcttcagaggaaacagtagctgagatagcaccccacagagagtaaaacctgtagggttggtgcctgatggtggcagaactttggtctctcttagggcagccattggtgtcatttggccatcattccggactgcataggctccatgtctaattctcttacattctataatgctacaagctatttagtatcttggcataagtgtattttattatttaactggtagagtggattctgctatttgaaaccaagaatgccgccaactacttgcactcaagaccaccattgcatcgcagcccagaaaggagtgctcagtaaatatttggccagtcaatgagagttcataaaaatgaattactgaaaacaaagaaagagtttaataggttcagaaaactgggacttaaaagttatgatacattataaaaagttttccattttggaaaatggttaatgcaaaaatttaggagaggtcatgaaagactttgtgctttccgttttacatgcattatgtcttcaaatcaacttcagttatctagaacttgatgactcaagtaccaccaacttgttgcttttagtcacaacacaggcaccaggtgctattgtcatagacaggaggggactagcaaccatctgtagtctatactctaacccagaagataaagatgtaaacagtgtgagggtgggaaagaattttctcattgcctataagcatatcagaatgaaataattaatttatttctgtcccttaatcattatggtttaaaaataaccagtcattaatgtcttcattatttttattcaacaaatatttatttattctaggactaccaagtacctgatactatgctagaaataattagaaataattaacagttaataatatatcacctgctactggtttgattaaattcaactcagagtgttctctctgaaattgcttaacggaaatccaacttgggtgttaactaaagtcttctagctccttaaggctttggtgagattgactcaaatctctgtgcatgttctggaaagttacaaatcctcacccaaccaaaaagaattgtaaattctatttccctctggcttctactttcaaccttgtgtgaattatacactttccattacatattttggaacttttttttaaccaaaagtgaaactcatagttttcccctgactgccacctccgctaccaaagaatcacatttacataagacctttatatgtatagcgatttggggagagagggatgtttatattacagcaatgcaaataactttgaaatgaatatttgccatttgagcttcaaaatccttctattctcttgcaataaggctcagccagcccatcacctctatttctctttcccttctttttgtccctgtgtcctctaattctcatatatttctatatagcaaaatagctaagatatcaggctttggaaccaggcctctggggtatggattccagctctatccattacaattcgtgtgcccttgggcaaggtactttagacctgtgggccacactttccgtgtctgtgaaataggaaccaccctagttcacaagtgatttgtaaagtgagttaacatatataatgttttttaaagtgagttaatacacatatgtagcccctagcacgtatgagtgcatgcaagcattaggactttcattattgttaatatggagggttcaattatcttctttattggtgctatcacatggactaacccatctcacattctggcctgaaaaatgtttgtaaataatttttcttccctaagaggaattttctttccatttgctaaggtactatctgttactggcctgtgtgtaagggctcaattagtagtccacccaagtacttggtttcgaaagcagatggcctgagttgaagcctggtaccactccttacgacctccctcttgccccttaagcaacttatcactcctgatgcttcagtttcttcatctataaaaaggggaatgataatatcacctattccaaagtattgttttgaagattaaataagttaatactttgagaaagtaaacattagcttggactgagaaagtaaaaatgtctggccattcatcaggcttggataacagacaaaagatgaaaacagctgcaaagttaacagctaatgatatttcttgcaaggacacaccactcttgtaaagtgtcataaaaccctcttcgttgggtgacatctgctttcttatttagtgagaaactttgttcttcaaagtcatagactatcagaaatgtgatgttgaaatcacatcagtatgcatgaaacatctctctcttggattgcttggttgcttggtttgggcttcagtttttttaaacacacatttattatcccacagtttctgtaggtcagaagtctgggtgggctcccttggctcttctgctaagggtctcataatggtaaaatcagagtattggccaggctgcattcttttctggaggctctggggaagaatgtttccaagatcattcaggttgttgcccaaattcagttccttgcagttgtaggactagggtcccatttccttgctggccgtgtgagcctactggtctctgttcttggaggtttcccataaaaacatccccctcttacctggaagatttcagctattttaacattaaaaaaaaaaaaaaaaaaagcagcccagagttaacaactcatgtgcaaaccttcaaataagaggtttctggctgcaatattttacatctaccttaactttggtatttcaaagtaattaacaggaccttaacaggaccaaccctgggtctactttgtgtccagatataatgttgatccattaaatatggcactgctttgctttgagcccatcagaatactactttagtttaatcttgcctaaaactccacctttctccaaaatcctgtaataactgcattggttcctttatttggtaagatgccccacacttcctctgatgtgtgctctccctcattgcaatgaatcagcaacccaacttagtgggactaggagcttgtccctggtggtcttagactgattgagctggaagaacttaaattgctttgaacagagactgccaagtggcaatactcaatttaatcttctctataacaacaaatacaatgataataactattactagtagtataaactctgtgggtaaatacaaataaaaggacaatgatgctgtgccaaggatggaagctgcagataaggcagttggagaaaacaaacaaaccaccatgtactgtgtctacagaaatccctcaaactgcaaagattttcccaaggcaaatttccacttcagaaacctcactcggtgtcatgtgacaataccctcggtgctggtggaagaggttcgctcctttgaaatgctttttcaacatgcaacgtggttttatgttaacacttctggactatgagctggaacagtgaagccacagtaagactttaaaatggatttaaaaatcggccccaagattaagtagaaagataaattaatcttagaactgtctctcaccctttcttactgaaaatgtgattttaaaaatatttttagtaataattattgataatcctagcataatgtaaaagggcctgggctttgggggatattttaaaaacatgccagaggttgctcagagcatcctccctccccatctttctggcccatttaggtcgtatctctctcatttggacagttaatcttcagtgttttccaaacactcagtttacaaagattgggtcaatgtctcgcaacgtttggaatcttaatagactcttaataaatatctgtttgaaaaaatgagtggactctgatatgtgcttcaaatggtataccaccccctagaaatgtaagtatgagagaaaatgctgacctggaaattataaaaggcaaccagagagtagtgtaaaagtcgttcagacataagtagataagacttgccctagggccacagaacaacaaaacgtttcttattgtttgtctggtttttgttttgttttgttttgtttttgctgttgttgtttgttaactcagtgtagacagagcaattcagctcactttaattggctaagtcgatcactctgttagttttcaggtcaactatcctgccttccttaactttatgggtatctaccagtaaatgcttgatggatgaatttccacagtgtgttcggtttgctttcaaccaagctctattcagacttatatgtatgtacacttctaatattcaatttttaattttcttaagctaacaaataactattattcacagcaaatacttaagcaaatatctgattcaccagtatgctatttagtcttttctgttgctgtttgatcatttatttaagggggaaacatttaggatataacaaaatatacaaagaacagtacagtgaacacccaacttaagtaataaaacaacaatccgattgaaatctccatctctgattacagacccatctatcccaagaggtatcaataatatttaatttggggattattgtttccatatatttttctaaaacatttgtaattatccatttaaaagtatatacagtttgtttgcttattttagtctaactggtataataatttatttcctcccccaaaaaatgtttaatcaataatatcgttttgaggtttatccctcatgatatgtgtaactcctatacagtattctattatatgacgttatctgaatataccaacagtttattccctcttaaatgagtaagttgttttctttttcctttttcctttatttatttatttattttttgctattgtaaacagtaatgttacgagaattctcattcaggccttccaggggctatgtgcaagttttctatggtacacagttaaaaagggtaataaagatactattacagttactacaacaactactactagtgataacaaggctaacttttattagcctatttgttttaaagttattaactcatttaatcctaagatttctatgaagtagatacaattattaactccaatttaccaataaggaaaacattttggggaattattagttgtagaatgaacattctcttttttttttttttttttcttttttgaaacagagttttgctcttgttgcctaggctgaagtgcaatggtggaatctcgactcactgcaacctccgcctcctgggttcaagcgattctcctgtctcagcctcccgagtagctgggattgaatgaacattttctgtcttacagaaatattaccaaattgttttcctggcttcttacaaaaatgtatattcccatcaggaatatatacaacttcctgttgctctacattctcacaaaaacttagtattggcagacttaaaatttgtcttcaaatgtgtacgtagagatagatgtaaagagatatagtcactgagtgtttgaaacacagatcaagaaagactaaagaggtagactgagattgacataggaacaaatcaaaaggaaggcaagcctatggaaggaaactggaatatttcacccccaaatatacttttttagcatatttcaagatggatactcagaagggctgcaaaccacagaaatatcttgaaatgctgtctttttggggcggagttttgcatctggaaagggaatctgcactaacgaagtgaacagcagatacaaacaggttttccctgaggccctccttgtctccttgtcccaacctaggaatgattagctcacagaaaaaaagagactaaaagtctgaaacatttaagggtctgccagagaaacttctaccacaggctcccatctattctttctgagggcagctctgagatttgtcatctccatagcaaagcagccatggcttcctcccttactctcatcccacctccctcccaagaaacaataagtctctactcttgctgtaaccttccaatgtaacctccaaactcagccatctggcttttctttgaatctcatacttcgtgtctggcccctgtgtcaatatgcactttaatatatttgtgttccactttttcctattaatctgtctattgttaatctgtcagtttgttttgtagactcaatttgtcaagcctgaagaaagagaaggaaaaaaatttctcctcacccctacattatttcaggaattaggaaaggtgggcaaagtagtcaagagttaaaaactcaacaaaaacacctcatctgaagcttgacacttaattgatagtcttaaacatgcctgtccaagcaatagagtcatacacatgctaattcttcatttccccagcactcattcagctgtcaaagactacagggggatatctgaattaaagatcagagaatagaaaattcctttatctctaactctcaattcttccctacttttaacattatgacttttcaatagatgctgtgtccctaagcacctctactctctcctttttgttatgaataattcaaatagcacagagcaaatcaataacactcttttaaacctaaagttatcactttttcagcagcattcattcattttcttttgtttcctctaggagaaagaaatgtttgttatgtatgcttgatcgatgggcaaacattcccaaactatgaacacaaagagattaaaggccttagtacaaatcggactacaccccctgcaaaaaaaagtatataacttactaggccattagagacactcattttcactagttcattagcattaaccctctaagaccaaaggaaccttaaggtagcaccaactggaaaatctccagagtgtgggaagtaggcttctcactgtagctactatagattccttcctcatcaaagtgccttctgtattcagcagattgtagagaaaggtatgaaaacatgctggacctgatcaaagggtaagacttgttttactaaaaaataaattcaggccatgaaatgttaagataggctctaacaacaaaataaactatgttttactcatgcatcctatgtttttgtggcaaactcctttacacactgaaagacttgaagatactctcacctccgtaaaacactatgccttaattctcaaggagagaattttagagctctggaaattccgggttcctactagagttgatttaaaaattgttactgtctatgaaccacctcctctgatcttgcaaccccagaaaaaagcattgcaatagcaacaacaacagcaacagaatctcccttctttcatttctcagtcccattccattttgttatcgcctgaatttctaaaataccagccaggatcaccagtggaaaatacaaagaatattcaacatctctttctggcactccaatttcaaagacaagccctcgttcggtgtcactgttactgataaaaccacttcagctcagggatggaagaatgccttgttacttcctcttcctgaagcaaagtaaacatgtttcatggcagatcgttggtagttgaaaagatttgcaagctacttaatgattacaaaccagcttttattctttcataaggtgggcagaatcttccactgtaattttcaaacaaaaaacgaatactagtaattttaaaagaaatttctctccatttgattcttgatcaaaccatgatgtaactattctccattagaaaattgattctgaatccttttaaattaccccatgacttattcacagctataattgtgattccaagaatactcaacaacttctaaagaatattccaattagtagtagttgaattttttctcagaagacaatgtcttttaaaataatttagtgtgaggttaagatatcaggaggtatgttgttatgcaaaatgtgtttatcctgagacagatgtctagaggagccatctagagcttgtcttggtttttgtttttgttttgttttgttttgagatggagtctcactcttgtcgcccaggctggagtgcaatggcgtgatctcggctcactgcaacctccacctcctgggttcaaactattctcctgcctcagcctcctaagtagctgagcttacaggcatgcaccaccatgctgggctaatttttgtacttttttagtagaaacagggtttcaccatgttggccaggttcatctcgaactcctgacctcaagtgaaccacccagccttggcctccccaagtgctgggattacaggcgtgagccactgcgcctggccttgtcttgtttttaaagagtttgtgacgggtgggagaggtccagagaaagaccaaggtttggggggtgggaaggaatgcagagtgacaaaagaaagggagaggaagcaaggaggagaaagaacaatggagagaacggaaaataaagtagactgcatttcatcacagctcctcctgattaatgaatatgataagaaactgataattgtccttaaggaagcatacaattttcatttctttagcacatttgagatctatttctttggaactacactaaactccagaatatcagtatagatacatcagtatcaggaaaagctgctgcacccaaaaatgctaactaaataatgatttaattttagaaaaagaactagctatacacacacacacacacacacacacacacacacacacacacatctaccaaaataaactaagacctctcttgatcctcaactctcttctgtgtggtccattggctgtaggacataatcgttgtaagaacaagctgctggatttcaggtacaactgttaaatgagataatacatccacaattatcaggagctgacaatgggaaattgatattattggccattggtggattactccagaaacagacctgagataagaatttaaaaggggtatttagcttattggggcaataaaggaaacaccaggaagaggagtggggaagaaggacagggagaacatcatcaataaagaatgtcttgtcaaaccggctgtcacagagcatgcctggggaaagtctggggacaagtacaaaacacagtcctcagaattagattatctaaggagggatggagctagggaatgcatacactaagttctataagtcattggttgagggctgcttggatgaggggaggaggtgcattatatcccagtcatctccaattggcaaaagaggcttcaatggctacagaaagcctcaggcaaagcaattcagatactggcaggggaatgtgggccctgggccctgtgaactgtggctgcaagggcaaaagggtacaggagcatgacaccatctgctgactactcatgcaggaactcaacactgctgagtataaggaaagaattaccccacattccacagagcacctgactgaaacattgtgcgggtcatctctttcaaaggcaggctattaagccccaggagttggaggacaattgaatttgatgtgaccaactcagcttgctttccactctctagcaagatgcccaaagagaacatgatgaagctccactcaagttacagagtttggacgtgctttgtcttttcatttctcaagatggatctaaagtcatgaaaatgtgtcctttgttctataatcctcatctcgcagaatcctcacatcacactatgtgagcaaacatccaattataggatacagaatttggctggcctttcccactggttcctgggaggaaacctctaaacccttggaatttcttgagtaataggtacgtctgtgttattcatgaggggtgtactggaccacactgagtttgcactaaagaggtgattcatggaagaccctcaatatcgtttcaggatggggtatcatgctgcaaaaaccaaccacattattagaaggctggggttttgagccacgtgatatcagtccaatttctttagagagaattggagctgaagattgagtgcaactatgtagacaatgattcaatcaaatatgcctacataatgagaccctaataaaagaaatctggacacccgaggctcaaatgagcttccctggttggtaattatacattgatgtgttagcggaggacaatgagtcctgaggacttgtaagtttcccacttgggaccctaccagacatcactctgtgcatctcttcatttgactattactcatttgtttcctttataataaaactatgatagtaagcatagtgatgttcttggttcttagttctagcaaattatcagaaatggctcaggaactcccaagcttgcagctggtgtctgaagtgaatttagtcttgtatagaactttgttcttcacttgaaaatttgacctaacttcagacagttacagtcagaattacactgcgtagcccaaaatgttatgcaattcttttaagatcttttgagtgctaaagggagcagaagttaacacaggtcttccttgttcaaatcacaagtgcttttcacttcacctggctgaattttgggctatttcaggaaaggttcaggctaggttcagggaaaactccaataaaagcggcttaagatgtccaagaatatgatgaagtacgtaatgtttccaaaaaaaataaacaaaatttgtttcaacaaataattatctataaagacagcatgcagatacaattatgcctgaatctgttcttaagctcctgtagcctaaaagttaatctagagaactttgctgatacttctctaaaattaaatattgagccagcttgagtttttccttatagcatcactaccattatgctttgacattttcacagattcactgatttttgtttcactttctttagcaaaagagcatgaagtacatcctcttgctcacattaatctcaaatgtgcagaacaataatatgtttttatttatctataattgaattcatgtttctcacaactacctgccttctgggggtgtgtgtcgtgtgtgtgtgtgtgtgtgtagcattttattttgtaggggagagtatagatgatttgtatagattttttaagtcatctttttgaagtatatatatacagaaatatgtacaaatcatatgtgtctagctgggtgatttttcccaaagtaaacacacctgcataactggcacccagatcaagaaatagaacatgaacagcaccccagagctcccatggcaccctatcttggtcaagatggtagggggtgatataaactttcatatctgccttcagagtccttggcagtggtctctggggcagaggtcattcttctgccatcagctgctgacatctgtggccagcacaactgagtagcacccatcagtggtctctgctgactgggccccacgtcagctctggttggtgctgtgagcccctcccgccccaggaatactatggtgattctcctgtgattctggctcacgtggtcacttggcagccctccaggacagaacccacactccatcacagtgacaccctctggaagtatcctccactattttcccaactatttctcctttccttctttgagaaggggagttaggtggggtggaaacacttcatgtttcagccatgccatgcccaaactcaagccctcgctccttctgcctaacaatgcagtaccatgaaaactgcttatatgggaccactccagattgggggcagggcattcttggaagcagctctttgtcttgagataggatactaccaggactcattttgtctcccagtccaaattggaaacctgccaaaactgaaactgcaagtggcaggaaagcaacctttcactactgccaagacactaccctaccgccgtgccatgacagtttacaaatgccatggcaatgcccacaagttgccacccatttctatggcaaaacccagaggttactccccattttctagtgatttctgaataacctgtcccttaatttgtatgtcattaaaagtgggtataaataccactgccagcatcccatgtggctactctctgtgcactgcctatgcgctaaccctgaaatcacagagttgtaatacagctgcttcaatatagctcctttcttccaccaccagctctctcttgaattcttttgggagtgaagcctgctctacatcagttttagagcaacaattagatactcctgtctacttccctctgttcttgcctaacaccaagttgatgatggccatatgcagagacagaggcttgcagagtccatccagcgtaatgtggaagcatgctgcatacccagctggatgagcttaggaaaacctggcccctccacaagatccaacctcatctcagaacagatctcaggcacctgacctattactctctctgtttcctttccttcttttaaccttgatattatgggcctagaagcatgagtcttcaaactttcctttattccatatcatatccttctactccaggacattaactctcctatctgagcttctttttccttcacttggtttatctgtctcccatcctagtggccataaacaaaaagagtatcctcactaccttggaaaaatattgataagagtcctccaaagttaggaaatacattatggcccagtaaaacctgattttcaagagtctggccttataggagggataagagaaacattacatttcatgtcaagagctgaatattacttttttctccttaaatatcttctgtaataatcctaatcctaatttcctcactccatttttctcctctgaaaccaaagaaataaaaaataaaaatgctttagaaagaaaagggaaaagccatatacacagaaacatacaattgaaaagcatacccacatagtttaaaatatcaatcatataagagaaaaaaatgcattaatgtaaaatatacagtgagggatttcagccaatgtacctgcatgtatatagtaccacacttggtaactaattcatcaactctagaagcactgggttaaggaactctgaaaacaaaagggagataataatgtctcccatttatgtggttatacatagtttataaactgtagtgttttgtagtttataagatgcttttgaacacttgccttattttaacttcacatgacccctgtgggatatgttttaccatcttcatttggaggcctagagcagttcaattacttgcgacccacatacagctataatgtgagaacaaaaaaacagtgtattcaaaacatgtcttgcttgtggttctaaaggtagaaatgaaatgggtatttggggcaaactgtcttgtttttccaaagagatatttttgtcacgttgtttcagttgttcaggtgataacaagcacaagcccactccatgtgccctagaaacactcaacaggggaagtaagctacatgccaactgtgcatgcctgaaagaaatgccctacttaggaaaacgtaaaaggccaccatcttcccaacttctcagtagagtgctccccttgaaactattgtgatgtgcattgacactgtgttttctagacagggatcagaggcaggggttgtacatttcccactctgaaggccattaaaagcttcaactctcagagtgggaagcagagaggttccgagagaagaaacaagttctaggaaattccaggaaaagggtatcctggtattttatcttaattttcccttttctgcattgaaattcccttgtgttatcaggagtcagtgaggtctgttgtgttcaaaagctacgggttatttgttcttgggaaatcatcttttgtacaatgctttgggaaaacagaccagagatgataattatgaagtagaaaagggatcacaggcttcaggaagagatagagggaggggattgagcctcagcctggagcaggagatactgaaggcgcaagtggacccatggaaccttccagtattcctcagggttcccagaaacctgctatcacccatatggggctcagacttggggcccctagacagtaaagaaaagggggcgatatttttggatctgcatctccaacaaatctcatgtcaaattgtaatccccagttttggaggtgggacctaataggaggtgattggatgatggaggcagggttctcatgaatgagttagcaccatccctctgatgatgttcttatgaaagtgagtgagttaccatgagatctggttgtttaaaagcatgtagtaccgctccccttctctctcttggccctgtttctgccatgtaaaatatctgctcccactttgccttccaccatgagtaaaagctccctgaggcttcctcagaagcagatgccactttgcttcctgtatagtctgcagaactgtgagccagttaagcctcttttctttataaattgcccagtctcaggtatttctttataacaatgcgagaacttactaatacagaaaattggtaccaaggagtagagcattgctctaaagacacctgaaagtgtggaagcagctttggaactgggtaaccagcagaggttggaagagtatggagagctcagaagaaaacaggaagatgagagaaagtttggaacttcctagagacttatacatttgttttgattacaatgctaatagtgatatgaacaatacagtccaggttgaggaggtctcagatggagatgaggaacttattgggaactggagcaagtcacttttgttatgcattagcaaagaggttggctgcattgtgcccctgccctggggatctgtggaactttgaattgagaatgaggatttagaatatctagtggaagaaatttctaagcagcaaagtgttcaaggtttggcctggctgcttctaacaacctatctcatatgcacgggcaaagaaatgacctaaaaccagaacttatatgttaaaggaaagtaaagactaagtttggaaaatctgtggccaggacatgtggtagaaaagaaaagcccgttttcaggagacaaagtcaagtgggctgcagaaatttgcataagaaaaaaggagccacacagagtccccatgggacacttcctagtggagctatgagaagagggccaccatcctccagaccctggaatggtagatccagcagcagcttgcaccatgcatctggaaaaggcacaggcactcaatgccaacccatgagagcagccacaggggctgaaccctgcaaagccgcaggggcggaaccgcccaaagccttgagacccctccccttgcaccagtgtgccctggatgtgagacatggagttaagggagattattttggagctttaagatttaatgactgccctgctgggtttcagatgtgtggggcctgtagcccttttcttttggctgatttctccctttgggaacaggagtataccaatgcttataccttcattatatcttggaagtaactaatttgttttttattttacaggctcataggcagaagtgacttgccttgtctcagatgagactttggactttgaagttttgatttaatgctggaatgagttaagactttggggaactgttgacaagggatgattgtattttgcaatgtgagaaggacatgagatttggatggggcaggaggtagaattcagtggtttggatctgtgtccccaccaaatctcatgtcaaattgtaaacccttatgctggaggtggggcctggtgggaggcaattggaacatgggggcagaattctcatggatacattgacattatcccctcagtgctgttctcatgagagtgggtgagttttcatgagatctggttgtttaaaagtttatggcacctccccctctctctcttggtcctgctccttccatgtaagacacttcctcccactttgcctttaaccatgagtaaaagctccctgaggcctcctagaataagctgctgtgcttctggtacagtctgtggaactgtgagccaattaaacctctttccttcataaattacccagtctcgggtatttctgtatagcaatgcaagaactgactcatacaagggggctcctttaatgcagggaacctgggttataactacaaataacagaaaggattccggtgtctgagtctgtgtctctatctacccttcttacctgtgtgccaaagaggcaggagggtgattctgaaagtaaaaagctcaccgccaatattttattttagtacaagaaaagagattaatactatggatgtagagaaagcaagagcttggaatctagaaacgacttagatcccaccatgcccttaccagctatgcaatctcagatgggccactcaatcccactgacagtcaattctctcatctgtgaaatgagtgtaccaatgctactttataggcagctttgtcaggattaaatgaagtaatttagaaaaagtacttagcagggtgactggttgcctggcccttaataagtatttcatgagttcaattctgtgccaaagataaagtattgctcaccagctaattggccattgttcaaatttttttaagcaaaatgaaaacttcaagcttattagaattaaaatgctctgaccccttgtattttggaattataaaagatattgtttctcaaaataatggtggtgggaggggtggggggaaccctctgtttgcttagggccatcttccagctcttatcaggtggcatttgcattagtctggtggtaaatccgtccaggatgctgaataaacaactgcttgcctttagttggatcttcaattacatcagatatgtgacctgatgtctggaagccctgggctgccaaggacagaacagtctctgtgaggtgatttaaaggagatctttgttccctggcccccaaatgtctttgtcccattatttcttgcagtctgacatgctccctttaaaccccaaaggctttctgtgttcaagagctccttatctattgttatgcaaatgtccctgggaaaaacaataataattcttcatcggctaatatttcaaggagaactatagcaacaaatgctaacaatttcttggaagctcagatgtaggagaggtatgtgtaagataaggaagaaggggttgggggaagagtgagttatctctaaaaggggaggtagatgagaaggatgggttttagaagtagataagccagcttcagtttcccaggagccaatctctagagccatgatttctgtttcctcattcataaggcaggaaagacaaaatttacctcactagggtggttttaaagattaaatgagacaacatgcagactgcttgttcctatgcattcaaaggaagtggtgaccattaactccgcctccaggctgtaggttctgagggactaggatgcaagatcccatctgccatttgctcactgtgaccctggccatcacttggcttccacctgtgtaaaatgggaaaaaggtgttttcctagtcattaaaaatgtaatatatgaggcacagcttattaatttctaggtagaaaactatacgattactcaagtcaattgcatgtcattgctaatttaaagaaaaagataatcaattgattttgggtgaacagttttaatttgaagcaggattagtcaagataacaatgtattttagccagaaataaatttaagtctgtagtcattagagttaaaatattctttctaatagctatacagtacagaaaaagactgctgaagaaatttgacatgtaataaaaaagagaatgaagaaaaagtgagagtggatttaaaaggctgctgttccgttttcagactgcaggctgcccccctgctgagctgcccagctgctcagttcatttcttagtgaagtgccttttttgggcttagccacaagatgtcagcctaagcttagccatttgtgcatttttccgcgcctccaacccatttcttcccttccatttcatttcctctttcggctctgagcaaatgaataatcttttggattgtgggcactagatgaataacaatggagtaactggagcattcaaagggcctctgctgatagcagcttccaccaagtctcaggaagagccccctttccttcccattgcagtccccaagcctgggaggccattgtcctctctcaggccaagtgtatctatgtgttggcgcttcctacacagggacaaaaaatccaggatccgtgacccctaggagagaatgctgttaacctgtctcccaggaaggtggataaaggcgatttcaggttggctcagcagccctgggaactttcaagggtgaatactgctttctcagctgcaacctgtcttccccaatgcatcggcatttgagaacaagataccccacctgggtacgagatgcctgcagtacctctaagaatcatgttctcaccacattggtgaaggcaaaaaatgggcagattttctttccccatggatttttgtaaaggtgaaaattttccagacaccccccctacacacaccagcaaatgtacacttacaactgactggtcagaaatcagtcacctgcctgtccctgaaaccatcagcagtaagaggagtagggatgccataactggtttagattagtgagatccatctcctgggcctagggagggtccaccttccttaagcacatagcttttgccagagatcagtactcccggagctgaattccagggcctgccgtgatgacccagaactcaggacacagccctgtctcccaggggctcagtgaacacacgtccagtcacgactgcccagggagatttgcagtgggctagagttttgctaaagagaggccaggcaaccaccaactaaactacctgccctttgctggagaaagaggaggaggaaaaagaaataaatgctgctgagactgacagagcaggagcaccgtcatctcagacaaacaccgccactttaagctccagctccccttctagcctcatgcatttcaaggaaatcacttctcttctaactacaagcagccagaaagagcagacagtaaaacacagataagacagctcgggcacagaggaaagtagggggcaagtcgcttgggtaactgccaaagttcaccctcatacaacgggccccagtaaaacagtgggccttaataagcacattcctttcccttcaggtgcactaagatagggaagctaaaagcagactcagggggctatgcctgcagctgcagaaagatatatgagaacagacacacaactctccttcccagataagcacaacaaagagacacagaagcaatccaagcctctgataaactctcctatcctgaattcttaaaaactcttggtcataagagagtgtggctctgacctagcttggccagccgcccctctcaggtttatttaaaataaacttgtccctgttgactgtaaagccacccttgaagtttctctcctctttctttaattcttgcagtgactatattgtctctggcatcaagaggactggggtcagtccagtagctctgggctctgggacctgctctgcttagactgtctgagaacccgagagcatggtgcctctgttctctgggtctgtttccttcagagaaatgcagtctgttccaggatgtacagcatcagaaccagcctgggctataggcctcctatggaaacaggcaggctcaggcccatgcttatctgtctctcactgtgccattgagccaccagagtcatgggagccagtgttttccaaccgaagggacttctgtgcccactttctagaacctctccttgagccgacctatggggataaaacacacacacgaaagcaggacatcctgaggaagggaccctgggaggaagatgaacagtgagaccattcctgttcatccttgtagaataggagataagttgatttatcattcattagacagaactgtgtaataaaggtatttatgtgtgcaaggctgtggtatgcaacaactctgggggaaggaggaagagaaagaaatgagacttggctttgggttggatgtgcgatgctttttctcagagaaatcaattttttgcagaaagaagcatgctgtctattgggatgtcgctgccccacgaacagtcactacacccttgatgcatcctctgcggggggctcagggcctcaggaacactaaacaccacaggggaccaggcttcatcctgacacacactgggaatcaacccagctgtcatttccatgggtgtggaagaaaactaatgactcaaggcttgaatcataagtggtccagcttccactggcagaggtagataagtcagtgagaaactcagatacattcacagcaactgcagcctctgaccggaatgggtcgaacctgcaagccacccttggcttcagcctgcttttagttcacaactttgtgcaaaagagaaattagcagcaatgtgaaatgtcacaatttgaaggagtctctgccagggctggacagttcaatttccttttcaactcactgccccaacattgtcctgctactttcaaggagagaaattcaagcataagggctttgtgaaccaggctgagagctctggacatggaaggagagggaagggccaggttctcactgggacacatactgtggtgtgtaaaggcatggaccctggaccagaatagcccaggccaatgcactgcatcatttctcctatttctgggacttctggcaagctccctggacacttctgtagctcagtcttacccttagtaaataaggctaagagtagcacctgcccctgagtttttataaggttaaaatcacaaaagattcagaagaatgcatggtatagtgagggctcagtaaatgtttattattttttattatgatttaccagttattctaattttgagcaagagggtttctctgagctctaatgaggagtctcaccctacctcaaagcaatgcaggacagaaaagcccccaaattggggcttagcctggttcttggcttcacccaggaaagaacgtaagggtaagctggtggtgttagacagcaactttattgaagcagtagcctatagcaacagaggcactgctccttgcagaggagggttaacccatagacagtgtgcccacagtggcatcttacagcaacatcaccagaaacagacctgtggctgaacaagttgtttctcactcattgaaataagggaaaacactgtggagaactgtggtgtctctcagtaagagcatgttaaaaaagacagtataggatgtgggactttagttagattcctgtcttcatcagctctggctgctatataacgaagtactgtagcctgggtggcttataaacaacggcaatttatttctcacatttctgaagtctgggaagtctaagatcacaatgccaccatggttggggtccagggaggatccttttttgagttgcagaatgccaattccttgctgtttcctcacatggcagaaagagggtgagagagctctctggagtccctattataaaaacactgatcctatttataagagttctaccttcactcctcaaacacctccctaggccccagctcctaccacagtcaccttgggggttagaatttcaacatatgaatttggagaaatgtaaacattcagtgcttaccagtgctttaggggatgttttacagaatcggacttttgctctgaagtggaggccatcaggaagtggtgttaacactatgattgaatactttaaaaatgtgatctacaatttggaaggaagtaaggttaaagctgtggttggtgaataagccactgttacacatattagctgggaatgaggagtgtttggtcatttgtgtagtttagataaggttcacgtttctgtctgcattcagacatgactggagtggtcttctttttgtcttgattcaccaccatcacagagtggccttttctgatgctggtactcagtgaaattgtttatactcagccagagaatattatgacctagctgtgagtgcctgttctactcctagcaacaccaagaactaacagtgctagaccagttctcaaatatgaagggttgcgtctctgtttctttctaccctcttttggccaaagcaaactagtcaggcatcaggatgtagatcattgatccctaccattgctgagacattgctaatctgatatttatccagagcgcactgtctgcaggcaaattagggttttaattcaccatcttgtattagtcaggacatctcttttcttctaaagcatttcaaagtcatgaactaacctaaaaatcatacgtgctataacaccttctttatctctgggcagctgacatatctgagtgagggcaattaagtcagcccactggaattattcaatttctgagagaagcttgtattgcaaggccaaatttaagtttctgatcacgtaaatggctttataatttttagcttttctttttcagtatgaaccacataaaatcaaaataaaatcacatttatcttggctagaaggtttgcatgattgtgaatagttcccaaaaggctggaaattattgggtcctctttcatcagataaaaaataaatcaatcaacaaaataaaatacaaattaaaataaaaaagatgatgcctgggttcagagggaagcagcaatggatgtagacctttgaagggtaaggcggtaatatttcatagatgtcacatgactgtcaataaaagaatctgtgtaagatgagaaattgttaagtgtagtagagatcctagaactaagtcaatggaagttttcatacattttgctattgctgttatagatcttaaacaaggtcgatatagcttggctactagagctaacaaaagactaaaataagcagtaggtccctaatgattcccacataattgggtcaacacttactgagattttttataaacaaaaagtaaaaagggatttgtgaatctagaaacttggagaaaattcttttaatagttactgtttctgtgtgtatgcttaaaaaggaacatacttcttttaacttgaaaagtatatgattactaaaagctaattctagtaatactttttactaatataaaattaacatcagctctcttctggatttgacatgtttggaaaatcttttgtatgtttttaaatcccaaagttgaaggactctcataacagttttgaagtatttaaaacctgaagagtttcaacaaacctaattattcctattttcctttattttatagggtgaaagagcaaaattattctgaattttggaagggtaaaaaaaatcattataaaggacatgatacaaagtcaaataatttcaggcaacattataaatattttgtaagtaactgttctaattaagaatcaattaagaaaactaaacatgaagtttcttgaaaactgatttaagtgcgtacaaaaggcaccaaaatttaacagaataattaaatcacaaaaagaaacttctacaatctaagcataaaataggccagtcatgttacataaaaatgacactcatttttttctgttttacgtcatttttgtaataatttggagtaaaaattgaatacatgtctctgcatgtattcaggcatgcagagacaagtataaaaataagtaatgttaaaacttttactcatagctttaaaaaacaactaacttaccagcatattaaataatacatacatatcatattaactttgtcccatgaataagctattaaacatttcttaagcataaaattatatattcatattcatattcatatttctctaattatcataccttgtgtaattaaatatttatattaattatccttatattaaattaaacaaatatatattataaaatgtaatatatagtacttcatattataaatatataaaacataattatattataaatatataaaatatataatttgttatcaatatgcaatatgtgaattacatttataatatataatataatatttatattacttatcatctctaatcaaaataaccaacttctttttgcagacacacaaaaagttagagaataaaaaaggaattgttttattatttttctctaagaacacatattattttaacatttcaaagggagaacaactttttgcttctttcttttcacagttaacagcttaattaaaataagatttgcctactataaaatgtgcccactgtaagtgtacaattcaaattgactaaatttatagttgcacaagcaccaccacaatcctaccttagtacattttcatactccccaaaaaaggtccttcacatccatttgcagtcaatcctgtcttccatccccagctttagttaggcacaatcatctgctttgtctctataaacttgtcttttctagacattgcatataaatggaattacacaatacataggctattttcgtctggattcttttacttagcacagtgtttttaaggttcattcatgttctagtacatatattagttgtgtgcttttaattatagaacagtgttccatggtatggtataccacatttatttaaccattggccaatcgatgggcatttcaattgttttcagttagacctattaggaataacactgctagaaacattcacagacatgtctttgtatcaacatgagttcatttttcttaaatagattccaagaagtggaatttctgggttgcatggtaagtttaactttttaagaaactgccaaacttacttccagtggagctgcaccattttaaactcataccagcaatgtgtggggattccagtttctcttcatcctcaccaacacaagctactgtcttactatagccattgtagtgggtatttagtagtatatcattgtggtttttatctattatatatggacctatgatccacttcagttaattttttgtgcagtatgagacaagagtcttacagttttcgttgctctatatacctgagcttgtggcaatactaagatgtcttgattactggagctacatggcaaattttgataacaagtatgtaagtcctccaacttcattcttctttccaaatattcttttgaatattttaagttctttacatatccatataaattttagcatcaacttgttcattctgacaaaaatgcctcctaagataattacaggattggtttgaatttgtagattaatttggggagaattgtgatcttgacaagaattagtctctaatcaatgaatatgacatgtctttacacttatgtataccttttaaatttctctcagcaatgttttataaatttcaatgtataggttttgcaaatgttttgctacatttgtaacttttattctttttcatgcgattataaatgaaatttttatttcatgtttgatttatttattgctagtatatggaaacataattttggagtttgatttactatcctacaaagttgttaagctaatctataacttataacattttctacaggatcttgacatctgtgaataaaaacagtctatttcttccttgacaaactggatgcttttattttcctatttataatttatgtttgctttatttcactcagtaaaaaactctactataattttgaatagaaatggcaaaagtggatatcttggacttgttcacagacataggggaaaagtatccagttctgtaccattatgtgtgatgttatccgtgaattttatataggtattctttattagaatgatgaagacttgctttttttttacagtttgttgaagttttatcatttatgggttagattttttttcaaattcttttcctccatttattaagataatcatgtggtttgtgttccttattctaatatggcatattgttttgatttttgaatgttaaacatactttgtaatcctgaaccaaatcctatttggtgattgtgtagccaaattgagagggtctcaatggactgtgtaggggtgggcatcctgcagttggtgggatcatactggacatttgtaaggaaaacccagtgtcaggggcaccaatgtggaaagcatctctcttcaatctggaagaatccactgcttaaggtgacagctgtagccaaaagagggcacagctctgagatcattaatttactgagcattttgatgattcactggtactacatggagtctcttcctcaggtataagctcaaaccttacatttccggaagagaaagaaatcacaagttgggtcattgtggagagatggtaggaaattcctccatttcaatgtaaggaccaaagaggccccccagctggaatgacctctttgtgaaactgtttggtgaatgtttctggagatggccatcaaagctgagctgatggtttactttctaaggaccttactcaggtggccactttcattctctctgcataaattatttctgctccccccagccccaggcgacaataagaactgcatcggctttcttattaagagtactaacagggaatttctaacgtggaatttataagaccactcagttttgtgtaatttcccttctaattattgatttctttccttgtactttttgtcttttctgaaactttgattatttcatttttctttttttctgtagttttttttaagtaccatgcaagatttaaataaaatataatctgatagtttatttaaaattacctagatttctcttgggatgttgtttatattcttcttggtctacttttgagacacttcatatcctctctttataaagagcagatatgtcaggaatataatagcaataatcatatgcccagaattttttcactgtaagacgtctgtgatgcttcaaggccttctattgaaacaatgtcccagagagttcataatgactaacagaaattcttgctttgaagaattgcagatgaaaaaaaaaaaaagaaaaaaatccactgaaactctctttgcttatttgataaaagaactggttgataccaaaattatctgggcatggtggtgggcacctgtagtcccagctgctcaggaggctgaggcaggagaatggcgtgaacccaggaggtggagcttgcagtgagccgagattgcaccactgcactccagcctgggcaacaaagcaagatgccatctcaaaaaaaaaaaaaacaaaaaaaacaaaaactggttgatacctgttagaaccaagatggctgactttaacaagcttgctgacattgcagcctgaatttgcagcctgaattttcactgattctttcactctcactcctcccaaatttgcacatatgactcatgagtagcatgaagagataactgcacaggcctaaggacttttcagactctgcttaccttctacaatcacctgctaatcccagtatctaccccatgaatctttctaaatactgccttggaaccaacacagggacacagatgagattgactcctgtctctttaggggttgaatctcaatgcaaagcttttattttctcaaaaacccattgtcatagtattggcctccagcacatagggcagtgagcccctttaggttgataccactgttccctcctatgggcgatgtcatttatcttcattgggctctactatcttcagaggttcttcttttgtggaattgctttctgatttttcaaagttccatggcatcagtttcttctagtggttaagagtggccagcaagtcaccttctcatgaaggctgtttgtacaccctcctgggggccagagcaaactctgccaagacaccagccatgtttttgaggcttctctcccaagcagactctgcaacctctctgcaagaatgtgcagactatagcatgtttgtggcagcctcacatactgatcctagagcacttatatcttcctcagtgtcaacttcaaaacaacctttctgtgaagctttgttagatctaataggatgcatgtctcatcgacaaagtgattcagaaaatgcaagcagtcatcttcatcacagtcctatggacttccaggctgaggtgacacgcagggcaggactgacaggtaggccaaagttctgggtagagaaggtggcaccaggcaaaaggtttggaaattgagtggagggcctaggaccattgcagccaggaactgagaaagctggggttgggactcggggagagggaagatgtaggccatagactgtagtctgaccgtgagactcaggggaggatgcggttgagagcatggagagggtgtccttgggagaggacctaggaaataagcctccatgaaagggccctggagcaggagctgaagcctaattgacatatcatcaccccatcccttcatgcccagcctctctctgctgggatcactccctggcaaccagctttttatcaatcccctctacctggctggcaaatcctgagcttcactccaggtggtcacaatctgacccttgtgacctcatgcttccccacccccatttgtgaagttccatcacaggaagttcttctccagtggcccctgatccagggagacccaccctgcaacagcccttgtctccctccgcccttggttccttctcacccatctcaccaccatctgcccaggggagccacatgtcccaaattttggagagaaaataattgaggctcatttccaggacagaggggcaagctgggtctaaagagccaagcagaaaggcttcccaaaatcgctaggttgggaggggtcagagacgtgtggctgccccagctgttctgactctgccccagcttttggctccacccccttaaagcaccttcagaggttcccatggcgacagtaaacaagtctccactgccttggccatgtgctgtgttcaccccactcctgatcttgttggctgctcaggggctgacagcccagatgtgcagctgtgatgagcagaaacagggaggaatggagcccccaggtgagcggcgaggcttggatttagggaagagcagcctggggatgtggatatggatggaagaggctctgagatttgggatctgaacttgggcatcaaggcagcagttctttctttataggaacttcctattaaaacacattttttaaaaaaaaaatttaaataaagaaaggaaagggccttataggaaaggccacagtagctcaaaaattatcagtataagttaaggtttctgtgtctgtttacttttccgattttaataaaataaaatatctgactcactagagaaaatacataaaacgtgtactcgaagcagaaagagaattaaagaatcccagcatggccattactcatcttaagaaacagagcagtatttaccttagcctccttctgtgggccaccacccccttcaccaaacaaccacgtcctcggtagccactctcctgaattatatgttcattagtcaactgcctttctttgtagcttgacttaaactttctgtactattaaactatatattgaatagttttgcatgttcgtaagttttaaatacagcttgacactctattatcctgttgatcttgattttgtggtgccatatcttgctcctgctgacccacttcctgaatgtctgtcattctcacctgtgtctctccctttctactcttcttccagccattgtcatcacttcctcaagctgtctaaattctgcccagcagtctgtgaaaatgttgtgctgatgacatatgtaaggactctaactcccctcaaacaatctgctcacctgaaaggctcactcctgttgtaataaatgacacataaggtcacaattcaaccggtacccatcttggataccacttcttatgtaaacatcaaatatacaccctcttcccacacactaatgtatcctgtatatttgaaataaaagttagagatatacatacagagatttaaaatctaaaactgtcccctccccagtaagtcatgtatccgttaaaagaatatctggaaacctccaaaaggaagccaagcatagactatttggaagaacttgaaggagcgagagctgaccccatctttgtacactggcagcacaaggagtaagtgttaccctccctcataagtaagtgctacgcttccttataatttgctagtgcttaaggttttcagtccgaaaacttctccagcttggtgatctctgtctacctggtggctccatctagagggtcaagtaaaaaaaaatgaaacccaattgttggcatttttcaagagttatgcaagtagtgagtggggtctttcttctctctttatgcctttgtaatttactctttacatttactattacacttatcatgatctgttgtttattcgtgttatttaggccaatgcttctaaagctaactgctttaggatcatttttgaaatttccattccttttcaaataaatatttttgtaaaagaaattgttttaaaaaagttcctggaaaaataaaatgcaaaatttatacacattagaagtaaaaaaatgtttattaataaatttagcaagtcagaacagctatatagaaaaagaaaagaatttcagaaactgtacttggtgtttgttgatagtgtgcacatgggggataagtgtggaaaagagcaactcaaggtgtgtttttcctctgttctctcaacagcaacaatcaacacggaagacttctgtgaccaaatgtgtgcacgtttctctccatacaccaagcaagcaatctattctgcagcagacaccaactggaagtcctccaattcaattcaattctgacactgtctacctggaaatggcctcagcaaccacaggttgagagctcagtcccacaagaacacctcctccttccaaccagttgaaactccacacctccagaacttctcactgactggcttcgagttgaggtttccacagtcctctgtttgagtttgattaatttgctagagaagttcacagaacacaaggaaacacttacttatgttgatcaatttatcacaaaggatgttttaaaggatccaaatgggggccaggcacagtggctcatgcctgtaatcccagcactttgggaggctgaggcaggcggatcatgaggtcaggagatcaagaccaccctggctaacacggtgaaaccccgtctctacttaaaaaaaaaaaaaaaaattagccgggtgtggtggtgggcacctgtagtcccagctactcaggaggctgaggcaggagaatggcatgaacccaggaggcagagcttgcagtgagcggagattgcgcctctgcactccagcctgggcaacagaccaagactctgtctcaaaaaaaataaatacataaaataaaaaataaaaaataaataaataaataaataaataaaggatccaaatgaaaagccagatgaagagatatatagtgtgaggcctggaagagcacaggagcttctgtccctgtggagttggggtgtgtcatcctcctggcacatgacaggttcttcttctgcttcctgtcagcctccacatgttcagctctccagaagctctatacatcctgtcctttcaggccttttatgaagactccattggataggcaagataacaaacatgtagaaatgttattagaccaaagggtatgatctataatatctattataatgccaatagactgagtggggaaacccggcaaggcctgtctattcagattcttgttagcacctctgtgcagcattccttcctccagggtatggcaggacctttctcaaatgaggatcttatggcccacaatcagaaaggcaggggaagattagaggagggcaggggaaggtcagagagagagattatattttctgaggtctgctcctgagacttaaagcactccaacattataacagaagactatgggagttatgccaacaaccatggatgaaaacatgttttatatataatatatatattatatataattatatattatgtattattatatataattatatattatatatattttatatatactcgcaagaggttaattcagaaaattgctactgtggttgctactttttgtcctttaacaaccaatttaaagtaaaattttgactgaaatagcaattgatttttgagaaatgtcagcaatcgcaatgataataattttttagccattatcccaaaggaaacgagtgatgttttcaaaatgtacttcaatccttcagcaataatcagataaataaatttcctgtaaaattataattaaaagtaaatgatacttttaatttttatggataaataatatttgtacatatttatgagattcatgtgatattttgttacatgcatacaatatataatggtcaagacagggtatttagggcaactgctaccttgagtatgtgtcatgttctgtgtttatcatttgaaatcttcttgctattttgaaagacaatacactgttgttaactataatcactctactatgatattgaacagtataatttattcctttatctaactgtatgtttgtacccattaactaacctctgtccatctcccgcacccttgccatacacactcttttcatcttcttgtatctattattctcttctctacctccaggagattaacatttttagctcccacacatatgtgatgacttgtaatatttgtctttctgtgcctggcttttttcacttatgttaatgaactccagttccattcatgctgctgcaaatgacacgatttccttatttttattgctggatattattccattgtgtgtatacgctgcatttttatccattggtttattgacgaacacttaggttgattccatatctttgctattgttagtagtgctacgataaacatgggagtgcagatatctttttgaaatattgattttgttttctttatataaatacccagtagtggtatttttgaatcatatggtagttctattttttgattttactaatttatattcccaccggtagtgtgtaaaagttcccttttctccacatcctcaccagcatctgttattttttgtctttttaataatagtcattctaacttaggtaagaggatatctaaattatctttcaatgaaaggaatgagggatacattaatattaggcattgatcttcttttgacagaaaaacatcaaaatgttgtacaaatttgtaaggatttgataataaattttggcagatgtccaatatcaagatcaccaaccacttcattaataattgttgttaagtcatggaacttgtctgcagaaattgtattcttccaagcttctaactgaggattttgcccttcaaccttatctgctgtgaaaagacatgtttttttttgcaaagcaatattaagataattgaaatatccaaaatactagacaaatgagaaagattcgttgtccaatttcatcttaaagtcaatatcaaattggttgcttaccttggaaacactgagattgttctatagttcaacagttctccaccaaacttttaccctcaataaagatgtacttccacatacattaacagttgtttttagtcagctttcacattattgcctataaaaaaattaaagttattacccttatggaatgattacattttacaatttctctaagcataatgtttagttcaacaagattttttgcttttctatatataacaaaaatttctcaatgaagcaaacattacattgatttataatctatcgcaagcttcttaatctgactaattatttcagaacatgcccctactgtgctcaacaattacatagttcctgccatttgtgactcatcatgtgaatttgacctgttctgtaactctttcaataaagcaagtccacttgctttggcacagtcaaattgcactaaaagtgttgaaacacttactctcaacaactgtcttaatcctctcccaggacagtagttgaatattcaccatgcagcaatggtccacagaccaccacttgaattccactgaataggcattgttttctccccatcaactgacagggaattcctaaaagtgatgtttagcttattttctgtttgcaaagtcatactatggcacactacatttagattcatgcaacaaatatttattagaattagaaatatttaatagaattaaacaatgaggctatatcattagatacatgttaagtagtgatcttccatgtccaaaaagtcttttcacacacttgtctttctttgggttcaaatcaagataaaaagtttgtgtgtgtgtgtatgtgtgctttgtttgtttggagacagagtctcgcactgttgcccaggctggagtgcagtggtgcaatcttggctcactgcaaactccacttcccaggttcaagtgattcttgttgcctcagcctcccaagtagcggggattgcagaagcctgtaatccaccacgcctggctaatgttttgtgtttttttttgtttttttttttttttttttgtatttttagtagagatggggtttcattatgttggccaggctggtctcaaactgctgacctcatgatccgcccacttcggcctaccaaagtgctgggattacaggtgtgagacaccgcgcccggccgtgtgtgtgttttaaaatattattttgagtatgtcttttcttggtggggaaactcagcagcagagggctgagttcaataaaggctccaatcaaaacatgatatactcattgattccctcaaagtttactccctttgtgatttatttattccaatttctcacattttgtttctgcctttttagtttagctcttcctctagaccactccaagagcataggccttgctggcatactactgtcttttttcttaaaaaatatatagagggatcctgttagattagtgttcagcaactactgcaggcacgacatatctggccctgtacattttatgaaaatgaacttactggaacactgctgtgcctactcatttgtgtactgtctacgaaagctttcatgctacaacttccaagtccagtggttgacacaggaaccatatgacctgcaaaaccaagtatatttactatctgaccctttacagaaagtcatggaacccagaactggatgatccatggcaacttccatattctagtttttcaaaatccttttctactgccattcttactaaggagaatttcagctgatagcggcaaactaacaagtaaatgtttaccatgactgaagagagcttcctaaggcaaccttccaccccagaagcctcatttgtggttatggggcatgaccatagtgctggcagaccccagtcactcaatagatacaacattcatttattcatgattttctttaaaaaatacgttacactaaaggaacatgattaaaaaaaaaaaaacactacagactaatatccctgattaacatagatgcaaaaatccttaacaaaatactagctaacccatacaacaacatatcaaaaagataatctaccatgattaactgggtttcataccagggatgcagggatggttcaacacacacaggccaataaatgagatacaccacataaacagaattaaaaacaaaaatcacattattatctcaatagacacagatgtatttgacaaaatacagcatccctttatgattaaaaccctcagcaaaatcagcatagaaggggaatactttaatggaataaaaggcatgtataacaaaccctcaatcaacataatattgaatggggaaaagttgaaagcattccccctgagaactggagcaagacaaggaggcccattctcaccacttctattcagcgtagtactggaagttctagccagagcactcagacaagagaaggaaataaaggacatctaaatgggtaaagaggaagtcaaactctcactgtttgctgattatatgatcatatacctagaaaaccctaaaggctccccccaaacttcctagaactgatgaatgaatttagcaaagtttcaggatacaaaattaatgtacacaaatccgtagctctgctatacaccatcagcaacaaagctgagaatctaatcaagaactaaacctcttttacaatagctgtaaaaaaaataaatcaataaaacctttaggaacatacccaaccaagaaggtgaaagtatccacagaaaaaaactacaaaacactgctgaaagaaatcatagacgacaaaaacaaatggaaaaacatcccatgcttatgtatgggcagaatcaatattgagaaaatgaccatactggcaatgcaatctacaaactcagtgcaattcccatcaaaataccaccatcattcctcacagaactagaaaaaactatcctaaattttatatggaaacaataaagagctcacatagccaaagcaagattaagtaaaaagaacaaatctggaggcatcacattacctgatatcaaactatactataaggccatagtcaccaacataccatggtactgatataaaactaggcacatagaccaatggaacagaatagagaacccagaattaaacccaaatacttacagccaactgattttaacaaggcaaacaaagacataaagtggggaaaggacatcctattcaacaaatgatgctgggataattggcaagccacacgtaggagaaagaaactggatcatcagctcttgccttatacaaaaatcaactcaagatggatcaagaacttaaatctaagacctgaaactataataattctagcagacaatatcaaaaaaactcttctagacattggcttagtcaaggatttcatgaccaagaaccaaaaacaaatgcaatataaacaaaaataaatagctggaacttaattaaactaaagagcttttgcacagccaaaggtacagtcagcagagtgaacagaaaactgacagagtaggaaaaatattcacaatcaatacatctgacaaaggactaatatccagaatctaaaatgaactcaaacaaattggcaagaaaaaaacaaacaatcccatcaaaaagtgggctaaggatagggatagataattctcaaaagaagatattcaaatggccaacaaacatatgaaaaaaatgctcaacatcactaatgatctcggaaatgcaaatcaaacccacaatgtgacaccacttcactcctgcaagaatggccacaatcaaaaaacagtagatgctggcgtggatgcaatgaaaagggaacacttctatactgctggtgggaataaaaactagtacaatcactatggaaaacagtacggagatttcttaagcaactaaaatcgtaactaccattcgatccagctatcccaccactgggtatctacccagaagaaaataagtcattatatgaaaaagatacttgcacatacatgtttatagcagcacaattcgcaactgcaaaattgtggaaccaacccaaatgcccatcaatcaatgagcagataaagaaactgtggtgtatttatatatgtatatgatgaagtactactcagccataaaaacgaatgaattaatagcattttcagcaacctggaagagattggagactattattctaagtgaagtaactcaggaatggaaaaccaaacatcagatatcctcactcataagtgggagctaagctatgaggatgcaaaggcagaaaaataatgcaatggactttgtgaactcgggagaaaatgatgggaaggggatgaaagataaaagaccacaaattgggttccgtgtatactgctcaggagatgggtgcattaaaacctcacaaatcaccattaaagaacttgctcatgtaatccaataccacctgttccccaacaacctgtggaaataaaaaaaattaattaaaaatatatccattattgtcatttcatttagttgaatacagttaattcatacaactttgtattttaagcaagttatgcaatcagtggtaactttttaataagtttatttataaacttgcttgtttataagtctaatataggaaatttataaaattgaaaccatgagaaattttatcctcttgctgaacaaacaaaaatagttcgtggcattatgtgtatattgtaaactgattttttaaaaccagttatatcaaaaactcttctcatgttgaacccaaagccattacttcttagctcataactatagaaacagaagcttactatgtaaatatgcttttaactgtccactaaaagaaacatgacttaattactttttctttaagacagggtctcactctgtcacccaggctggagaataactttctgcttctttcttttcatattaaacaacttaattagatatgatttgcataccataaaatatatcctctgcaagtgtacaattcgaattgtttgggtaaatttatagttgtgcaagcaccaccacagtcccgttttggtacattttcataaccccccaaataggtccttcacatccatttgcagtcaatcctgtcttccatccccagccttagttagacacactgatctgctttgtctctgtaaacctgccttttctagacattgcatataaatgcaattatataatacataggctattttcctctggctgatttcatttagcaccatatttttgaggttcatccatattttagcacatatgttagtagtgtgcttttaattatggaacagtattccatggtatggatataccacatttatttcaccattgatgggtatttgaattgcttccagttagacctattatgaatatcaattctagaaacattcacagatgactttgtatcaacatgttttcatttttcttaaacagattcctgggttgcatggcaggtttaactttttaagaaacttccaaacttatttccagtgcagctgcaccattttatactagtaccagcaatgtgtggggattccagtttctctgcatcttcaccaacgcttgcttctgtctgtcttactatagccattttagtggtacgcagtagtatatcactgaggtttcaatctgaattgtctaatggctcataatattatgataatgtagatcattcataggcccataagccattcttatatcttccttggtgaaatatctaccaaaatacttttgaacacttttgaattggtttcttattgttgagttttaagtgttctttatatattctggattcaggtctattatccaatatacgatttgcaaatggtttcttcctgtctgtggattgtgtttttgttttcttgaaaatagtttttcttctttctctcctcttttctctctcactacgcatatatagtttctatcagcgttgtcatacagatttctaaagttctgttcactttttaaaaatcaaaactatgcaaatttgtgcccaaagaaatttcttctaatagaaaagcaacacacaaaaccctaaacaagcagaaggaccacagaagctggtgttaggacagaaaacaaattcactgaggggaaaaaaaacaaagctgatcagacaaacaaaagtaccagaggacctcataattaggaaaataaacaaaacacagaaatgcttaaataaaatattggagcttagttgtacattaacttagcaatcagccaaggacaatttgataccttaatatgtaaacacacaagagatcacaaatgtacacactcttactgagtcaaggcttccagcccaagacagtaaatgtttcatatgaatcctggtgaacctgcatttctgtcaattccttacaggcaaagaccctaaagaaaacaatgcaatattaataagcaagtattagaaaagacttataggattttggcttatgtaaagtttttcagagataattcataaagcaaagttttgctttgtattggatgctattaggaagtggggataattccatgattggttatcttgataaatcttaaacaaaaaaagcaatgggatggtgaggctaaagctgtgattgttaaacaaatgtcagttactcatattctgaccaggagaggaatatgtttggccattttttgcagttttagcagtttgtatgttttgtttgcattcagacgttattacagattggtcttggtttttgtttttgtttttcatccactaaagccacagaggtgccttgtctagtgctcttgtctttttatgttgaacaggagaactttaccacctagctgtcagtactgggccagatccaccacacctaacagtaacagcccagttctcagatgccaggggctagtgtcctctttttcaatgtgataatccaggaatgctactattaaggatatgggctagcaggactctgaggtgggatggaaggctctcagcttcccacaggtgaggagagagggtctcaatggactacgtaggggtgggcatcctgcagttggtgagatcacattgaacatttgtaaggaaaacccaatgtcagggcaccaatgtgaaaaacatcactccttactctggaagaatccagactgcttaaggtgatagccgtggccaaaagagggaacagctctgaggtcattaatttaccaagcattttgatgattcactgttactacattgtagtctcttcctcaggtataagcccaaatcttccatttccagaaaagaaacacatcacaagttgggacattgttgagcgatcacaggaaactttctcaatttttttgtgagggccaaaggggcccccagcttgaataaaacctctttatggaagtgtttggtgaaggtttttggagatggccatcaaagctgaactgatggcttatcttcaaaggaccttcctcaggtggccactttcattctctgtgcatgaattctttccgcagcccaagcgacaatgaaaactgcataggctttcttattaagagtgctaatatggaatttctaatgtggaatttgtaaaaccactgagttttgtgcaatttcccttctaattattagtttctttcttttactttttatttgtcctgatactttaattatttcaagtttcttttttttcaatagtcatttttaagtaccattcaggattttataaaaatattagtaatcgggtagtctgtttaaaattccttagatttctcttgagatgttgtttatattcttcttagtctgcttagtaaacacttcatatcctctctttaaaaaaaagcagatatgtcagaaatatgatagcagtaattacgtgcccagaacttatttttttttttttgagaccttgccctgtcacccaggctagcatgcaatggcgcaatctcggctcacttcaacctccacctcctgggttcaagcaattcttctgcctcagcctcccgagtagctgagattacaggtgcgcaccaccaagtccagctaattttttgtatctttagcagaggcgggtttcaccatgttggccaggctggtcttgaacgcctggcctcatgatccacccaccttcgcctcccaaagtggtgcccagaactctttcactgtaagatatgtctgtgatgcttctgggcctgctgttgaaaccagtcccaaagagttcataatgactaacagaaaatcttgattttgcagaatggcagatgaaaaaaaaccaagtcactgaaacactgaaactccctctgcttttgaggtaaaagaactgcctaacattggttgggaccaagatggcctactagaacaagcttgctgaaactgcagcctggatttccactgcttgtttcatactaacttctcccaaatttgcacatatgactcataaggtagcatgaagagataactgcacatgcctgaggacttttcagactctgcttaccttccaccaatcacctgctaaccccagtatccaccccataaaacttttctaaaaactgccttggagccaacacaggagacagatgagcttgactcctgtcttcttggttgttgaatttcagtgtaaggcttttattttctcaaaacccattgtcctagtattgccttctagtgcatcaggcagtgagccccttttgctccataacactgtttccttcctacgagcaatgtcatttacccacattgggctctgctgtcttcaaaggttctccatttgtacattcactttctgatttttcaaagttccatggcatctgtttcttctaatggttaagagtggccagcaagacaccttgtcatgaagatgttttgtacaccagcctgggggccagggtaaattctgccaagacatcagccgtgtttttcaggcttctctctgcaagcctcaaagaatgtgcaaaccacagcatgtttgtggtagcctcacatactgatcctacagcacttatgtcctcctcactcttcattttgaagaaggttatcttcaaaatgaccttgctgtgaagctctgttagctctgatagggcgcatttctcattgacatagtgattcagaaaatgcaagcagcatatcaatgactgtcatctggacttccataccgatgggacatataggggaggattgacaggtaggctaaaaatgctgggtagagaagctggtgccaggagaaatttttggaaattgagtggaggatctaaaatccttgcagccaggaactaagaaaactggggttgggacgtggggagagggaagctgtagactatagactgtagtcagaggctgagactcagggcaggatgcaggtgagagtggagaggctttccttaggagaggaccatgggaaataagtctccatgaaagggccttggagcaggagccagaacccaatcatcaccatcccttcaccccatcccttcaagcccagcccctctctgccgggctcactccctggtaacctggcttttatcaaccccctcttcctggctggccaatccccagctccactccatgtgggtcacaatctgaccattgtgacctaatgctcccccaccccacttgtgattccgtcaccggaatttcttctcaagtggtctctgatccagagagacacacccagcggcagccgttgactccctccacccttgcttccctctcaaccatctcacctccatctgtccagtggagccagatgtcccaccttcttgggagaaattaattgaggctcatttccaggacagaggggcaagctgggtctgaggagccaagcagaaaaacttcccaaaatcactgggtggggaggggtcagagacttactgctgccccagctgttctgactctgcccccagcttttggccccacccttttaaagcaccttcagaggttcccaatggtgacagtaaacaagtctccactgtcctggccatctctgctgtgttcaccctactcctgatctttctggctgctcagggactgacagccaagatgtgaggctgtgatgagcaggaacagggaggcctggagcccccaggtgagtggagtggcttggctttagggaagagcagcctaggtaagtggatatggatggaagaggctctgaaatttgggatctgaacttggggatcaaggcagcagttctttctttataggaacttcctattaaaaaacatttttttaatttttttaataaaaacaggaaagagccttataggaaagggctcagtactgtagcccaggctctcaaaaattatcagtataacttaaggtttctatgcccagttacttttcctattttagtataataaaataaaatatctgactcactagaggaaatgcataaaatgtgtactcgaagcacaaagataattaattaaagaatcccagcatagccatcatttgtcttaagaaacagagcagtatttaccttagccttcttctgtgggcccccaccccctatatcaaaaaaccacctcctcggtagccattatgctgaattttatgtttatttatcaattgctattctttgtagcttgacttcaactttctgtactcttaaacaatatattgaatagatttgcatgtccataaattgtaaatatggctttacagtatattattctccgggtctttttttgtggtgccgtatcttgctcccactgatgcacctcctgaatgtctgtcattctcacctatgtctctccctttctacccttcttctagccattgtcatcacttccctgatctgcctaaattctgcccagcagtccgtgaaaatggtttgctgatgacatatgtaaggactttaactcccctcaagcaatctgctcatctcaaagggtaaaacattggctcactcctaatgcaataaatgacacataaggtcacaattcaatggtactctccttggatactgcttcttatgtgaacatcaaacttacacttgcttcctacacactaacatatcttgtatatttggagtaaaaattagagaagtacatacagggatttaaaatataaaacatttttttagttaccatttcaatctcgctgcttgttattggtctgttcagggtatctaattcttcctgttgtaagataggagggttatatcattccaaggagttatccacctcctctaggttttctagttcatgcgcatgaaagtgttcatcgtagccttgaatgatcttttgtatttctgtggtgtcagttgtaatatctcccatttcatttctgattgagtttattgggattttctgtcttcttggttaattttgctaatgttcaatcagttttatttatctattttatttattaagctggtttcaagaacaagctttttgtttcatttatcttttgtattgtttttcgttgttatttcaatttcatttagttctgcactgatcttgtttatttcctttttcttgctgggtttgggtttggtttgttcttgtttctccagttctttgaggtgtgaacttaggttgtccgtttatgctctttcagattttttgatgttggcatttagagctgtgaactttcctcttagcactgcctttgctgtattccagaggttttgataggttgtgtcactatttgcattcagtttgaagaattctttaattcccatcttgatttcatacttgacccagtgatcatttaggagcaggttatttaatttccatgtattttcatggttttgaaggttcctttcggagtggatttccagttttattccactgtggtctgatagagtactttatataatttcaattcccttaaatttactgaggctcattttgtggcctatcataaggtctatcttagagaaagttccatatgctgatgattataatgtatattctgtagttgttgggtagaatgttctgtaaatatctgttaagtccatttgctctagggtatagtttaaatccattgtttctttgctaactttctgtcttgatgacctgtctagtgtcgtcagtggagtattgaagtcccccactattattgttttgctgtctatttcatttgttagatctagtagtaattgttttataaacttgggagctccagtattaggtgcatatatatttaggattgtgatattttcctgttgaacaggccttttatcattatataatgtctccctttgtctttcttaactgctgttgctttaaagtttcttttgtctgatataagaatagctactcttgctcgcttttggtctccatctgcatggaatctctttttccacccctttaccttaagttaatgtgagtccttaagtgttaggtgagtctcttttttttttaatttttaaattattattattattattattattatactttaagttttagggtacatgtgcacaatgtgcaggtttgttacatatgtatacatgtgccatgctggtgtgctgcacccattaactcttcatttagcattaggtatgtctcctaatgctatccctcccccctccccccaccccacaacagtccccagagtgtgatgttccccttcctgtgtccatgtgttctcattgttcaattcccacctatgagtgagaacatgtggtgtttgcttttttgtccttgcaatactttactgagaatgatgatttccaatttcatccatgtccctacaaaggacatgaactcctcgttttttatggctgcatagtattccatggtgtatatgtgccacattttcttaatccagtctatcattgttggacatttgggttggttccaagtctttgctattgtgaatagtgcctcaataaacatacgtgtgcatgtgtctttatagcagcatgatttatagtcctttgggtatatacccagtaatgggattgctgggtcaaatggtatttctagttctagatccctgaggaattgccacactgacttccacaatggttgaactagtttacagtcccaccaacagtgtaaaagtgttcctatttctccacatcctctccagcacctgttgtttcctgactttttaatgattgccattctaactggtgtgaggtggtatctcattgtggttttgatttgcatttctctgatgaggtgagtctcttgaaggcagcaaatagctggtgaattcttatccattctgcaattctgtatcttttaagtggagcatttaggccatctaaattaaatattagtattgaaatgtgagatactgttccattcatagtgctatttgttgtacgtatatgcaattctcatcaaaataccaccatcattcttcacagaactacaaaatcaattctaaaatttatatggaagcaaaaaagagcccgcataaccaaagcaaaaagaacaaatctggaggcatcacattacctgatttcaaactatactataaggccatagtcaccaaaatatcatggtactgatataaagctaggcacatagaccaatggaacagaacagagaacccagaaataaacccaaatacttacagccaactgatctttgacaaagcaaaaaaagacataaagtgggggaaaggacaccctattcaacaaatggtgctgggataattggcaagccacatgtaggagaatgaaactggatcatcatctcttaccttatacaaaaatcaactcaagatggatcaaggacttaaatataagatgtgaaaaaattccagcagatgacatcagaaaaactcttctagatattagcttaggcaaggatttcatgaccaagaaccaaacagcaaatgtaatataaacaaagataagcaactgggacttgattaaactaaagagcttttgcatagcaaaaggaacaatcagcagagtaaacagaaaactgacagagtgggagaaaatcttcacaatcaatacatctggcaaaggactaatatccagaatctaaaatgaactcaaacaaattagcaagaagtaaacaaacaatcccatcaaaaagtgggataaggacatgcatagacaattctcaaaagaagacatacaaatggccaacaaacatataaaaaatgctcaacatcactaatgatcagggaaatgcaaatcaaaaccacaaagtgatactacttcactcctccaagaatgaccatcatcaaaaaatttaaaaaaaaaaaaaagatgttggcatggatgcaatgaaaagggaacacttctacactgcttgtgggaatgtaaactagtacaaccactatgataaaaacagtatggagattccttaaggaactaaaagtagaactactatttgatatagctatcccactactgagtatctacccagaagaaaagaagccattatacaaaaaagatacttgctcatgcatgtatataatagcacaattcacaattgtaaaaatgtgggaccaacccaaatgcccatcaatcaatgagtgaataaagaaactgtggtgcctagatatgtgtgtatatatatgtgtgtgtatatacatatatatatgctacagtttctgtggcacatacacacacacaatggaatactactcagccataaaaagaaatgaattaatggtatttgaagcaaactgaaagagattggagactattattctcagtgaagtaggtcaggaatggaaaaccaaacatcgcattttctcactcataagtgggagctaagctatgaggatacaaaggcataagaatgacacaatggactttaggaactcaagggaaaaaggtgggaagggggtgagggagaaaaaactactaattgggtgcattgtacactgctctcacgtgataggtgcaccaaaatctcagaaatcaccaataaaaaacttacccatgtaaccaaacatcacctgtcccccaataaccaacggaaataaaaaattttaaaaataataaataaaactgtctgctcttcagtaagttgtgtttgcattaagagaatatctagaaaccacctacgggaagcaagcataggccacttggaagaagtttcaagaaggagagctgaccccacctttgtacgctggcagcacaaggagccctcagtaagtgttacccttccttatcatgtgctaaatgtttaaggctttgagtcagacaacttcaagattggtgatctctgtcaacctcatggctttgtctagagggtcaactgagaaaagcaacaacgagttggtgcatttttcaagagtcatgcaagtagtgttgtcttccctctctctttaggctttgatgctttagtctttacatttactgtaacactgatcatgatctgttgtttattcaagttatttaggctgatgctgctaaagctaactgtattaaggaccatttttaaaatttccagtccttttcaagtaaatatttttgtaaaagaaaaattttttaaaattactgaaaagaggaaatgcgaaaattatacacattagaagtcaaaagtgtttactgataaatttagaaaatgtaaaactaaatttaaatacatatatcaggacagatatatggaagaaaaataatttcagaaactgtacttggtgtttgctgaatgtgtgcattggggaatgagtgtggaaaagagcaactcaagctgtgtttttcctctcttctctcaacaacaacaatcaacacagaagacttctgccaccaaatatgtgcaggtttctctccataccccaagctagcaattgattctgcagtggaaaccacctgggtgtctccaatttaatttagttctgacactatctacctggggatagcctcagaaaccacaggttgagggctcagtcccacaagaacacccccttcttctaaccagttgaaactccacacctccagaacttctcactgactggcttcaagctgtgtttcccacaaacccctgtttgagtttgactaatttgctagagcagttcacagaacacaaggaaatactcatgttaatcaatgtataacaaaggatgttttaaaggatccaaatgaaaaatcagatgaagagatatatactgtgaggcctggaagagcacaggagctcctgtccccatggagttggggtgtgtcaccctccgggcacatggacaagttctccttcacctgcctgtcagcctccacatgttcagctctccagaagctctacacaccctgtcctcttaggcattttatgaggactccattggataggcatgactgacatatgtgtagaaatgtgattggatcaaagggtatgatctataatatctattataatgctgatagactaagtggggaaacccagcaaggcctctgtctattcagattctttttggcatctctgtgcagcattcctacctccagggtatagcaggaccctttttttttttttttttttttttgagacggagtctcgctctgtcgcccaggctggagtgcagtggcgcgatctcggctcactgcaagctccgcctcccgggttcacgccattctcctgcctcagcctcccgagtagctgggactacaggcgcccgccacctcgcccggctaatttctttttgtgttttttagtagagaaggaccctttcttaaaggaggatcttatggcccataatcagagaggtgggggaagattagagaggacagggaaggtcagaaagagagatgatattttctgaggcctgctcctgaaacttaaaatgctccaacattacaacagaagactatgaaagttatgagccaacaaccatggataaaaaagtatgtatatgtatgtgtatatatatgtatatctcacaagtggttaatagagaaaattgctactgttattgtcacttttgtccttcaataactatatttgaagtaaaattttgactgaaataagaattgagtttttgagccatttcagcaatctcatgacaataatttttttagccttaatccaaaatgaaacaagtgatgtgttttcaaaatgtatcttcaatccttcagcaagaatcagttacataattttcctgtacaattacaattaaaaataaatatttttaaaactgtaattggtaattaatatttaacgtatttatggaacaagtgtgatattttcttacatgcatagaatatgtaatggtccagtcagggtctttagggtaaccattacctcaagtatttgtgatattccatgtttatcatttcaagtcttcatgtgatttttgaaatatgcaatacattgttaacgataatcactctactctgctattgaacattagaacctattccttttatctaactgtatgtttgtgctcattaactaacttctgttcatctccctgcacccttgccacacacactcttctcagcctctgatatcaatcaatctattcgctacttccatgagattaatttttttagctcccacgtatatgtgatgacatgcaatatttgtctttctgtgcctggcctacttcacttaacataatgacctccagttccattcatgctgctgcaaatgacatgatttatgctttttatggctgaattatatccctttgtgtatagacattacattttctttatccattggtttattgatgaacacttaggttgattccatatctttgctattgtgaataatgctgcaataaacatgggggtgcagatatcttattgaaatattgattttatttcctttagataagtaccaagtagtgcaatttctgcataatatgggtagttctatttttagttttactcatttatattcccaaaaatagtgtatacaagttttcttttctctacatcctcaacggcatctgatattttttgtctttttaataatagtcattctaaccgaggttaagatgatatctaaattatctttcaatgaaaggaatgagatctggatatatgaatattagtcatggaccttcttttgacagaaaaacatcaaagtgttatataaatttgtaaggcttttgatgataaattttggcagatgtccaatatcaagaccaccaactactttattaatatgtgtcattaagtcatggaattttctgcagaaacagtattattccaagcttctaacttgggattttgctcttcgacctcatcagccatggaaaaagatgttgaattttttcttcccaaagcaatattaagacaattgaaatgactaaaaatattagacaaatgagaaagactggttgtcctattccatattaggtcagtatcaaattggttgcttaacttggaaacactgagttcactccatagttcaaatattctccaccaaatctttcccctcaatgacaatgtacctccacatacattaacagttgtttttaaccagcttccacattattgtctacgaaaaattttgaattaaaattattaccatttatgggatgcatatgttttactatgtctgtaatcacaatgtttagttcaactagattttttgcttttatacaaataacaagaatttctcaagcttctaagtctggctaattattccagaacatggccctactgtgctcaacaattacatagctccttccatttgtaactcaccacatgaatttgacaacattctcctgctctgtatcccattcaataaagcaattccgtttgctgagacacagtcaaattgcactaaaagttttgaaacacttgatctcaaccattgtattaatcatatcccaggccagtaggtaaatattcaccatgtattagtggcccacagaccacatcagagttcatgctggtcctaggacaagagtcaagcacaccctgcgtccaccagctactggtagctgtcactcaggtaatgcacagctgaacagaacccagttctctctcttgcctaggtccccatcaatacattagttctgaatgatgctgtgaatctctctcaatacaaggtcataatcctaacccagatgattccaagatggtgcttctttccccaccatgataacctttctgcaacatccttgaccattcccaccattatttctatttcccctctaagaacatgtgggtatatctggatcccattcatgtcatatgtgaactgaggacagcttgaggacattcagtgtcaagccctctcttcttatgcctttatcactgtgacattttctcctcccaggatcccaaatgggaaataggtcttgaaagggatatcagacacatgtctgaccatgcgtctcaccattacatcagtctttggccactgtaggagcaccattgcccatcaccatattaaaagtggccacctgcagtcttccttccttagagtgcatgcatacaaaaaagatacttgcttatgcatgtttatagcagcacaattgcaatttcaaaaatgtggaaccaacccaggtgcccatcaatcaacaagcggataaagatactgttatatatatatatatatatatatatatatatatataatggaatactactaagccataaaaaggaatgaattaatggcattcacagcaaactggatgagattggagaccattattctaagtgaagtaactcagaaatggaaaaccaaacatcagttatgagctcccactcataaatggagctaagctatgaggatgcaaaggcataagaatgatacagtggactttggggacacagggggaaaggatgggacagggatgagggataggagactgcagattggaagatgcatgcaccaaaatctcacagatgaccactaaagaaattacttgtgtaaccaaataccaccttttccccaaaaacctgtggaaataaaaacttttaaaaagacatccattattgtcatttcattcaattgaataccatttatacatataattttgtattttaagcaagttagggaatcaatggtaacttatttatgtttagttgtaaacttgtttataagtatataaatacaatattggaaacttgtaagtatgtttactatctgacccttcacagaaagtcatggacccctgcactggatggtccattacaacttccatattctagtttttcaaaatccttttctgctgccattcttactaagggaaatttgagtcgatggcaggaaaaaaaaaaagtgaatttttaccatgactgcagagattttcctaaggcaactttccattccagaaactccacctgtggtcatggaaaagggcctttgctctggcagaccccagtcactcattggaaatgctccttcaacaagctccacattagctcccctggattttacaggctcaaacaattaaatcatagtgtctctgacagtaagccagcttttaaaatcagtcccgtaactaatgctgagtggaaagagaagctgagctcagtaagtagtatttctcactctttgttatgaaccatgtgtcctttcattttttaatattaattatgtatggcaattgttttctatattatagattattgtgaaaggctccaggcttttaagagaaacatttgaacgtatagctgccaaaagcactttgagattaaagtagggctggtggagatagaggtccctaagctctcattaaatgacagcctttcagagaattatcattcttcatcttatgtcttggtctaagcagcagagtctcgttacggggaagtttataatagattaaatttacaactgttacatcagtgcctaatatggtgctaggcatatagtagacactcattaaatgtctgttggatgaatgagtggtctgtgatgggtgctttccattgaatctcagccctctggaaactttaaatgtaagaaaaagtactgccgtgggcatttggtaatgagcgtctggacagcagcatgaaaaagtccagacataaatgagcagcgagttaccacacttagagacctgcacaggggccacggggcgtgggtctggagggcttcaggggtgcacaacaaataatgaatgactagcttcactggagtcttatttatgctcagttggtgacattagcttcaggtaaactatcttgtcttctttaaccctgtgggcagccctactaagtacttgctataagaattttctcatggcttttggtttttgcttatcttcaattccctaacaaggatttaaatagaatcaagacatcattatataaaccttcttgtatggcagtcaaagggactttccaagttaacaaataactattttttccaaaaaatgcatacgtaaaagctgattcatgaattcgctatttattcttcattcttgatatttgttgctttcttttgttgtgcaatatctaatatttactgaaagacatgaatgatacaatgaaaacatatttacatattatgcatcttgagaaataaaacattttcaatccattcgaagtcccatgcggtcttactcttgattatatagctctttctcccagctagagataacaactaccttgacttcccttaaaatatatagtattgtttacaaacttatggtctttatgtgactggtatcataatttggatattcttttgcaaattatttcattaatattacatttttgaagtttagccttactgatacatgtggctgttgtttagtatttcattgtatgaatataacatgatatttttattcatttcacttttgattaatatttaggttctttgcacatttttattcctattacaaacaacattttaatgaacattcatatacaagtctctttgtggacattgcaagagtttctctaaagttggaaattaataataacaacatttatactactactactgataaaatctgcaacttattaaaagctaaaaatgttacttctaagtattttacatatatcactttatccttacatcaatgctgtaagagagataaaattattgtcaccattttacagatatagaaaacataagtgggcgattgctggatgatatgcaaattttcaattttaccaaatatatcaaataattcttcaatggtttcaaacagtttccactctcattaatggtatataaatattaatatgtatttttgtagcacttgatcatgtcaggttttcaaaatttgtttgaaaacatttataaagataaataatatatattcatgtattatttgtgtaaatgctcagaaaagagagaaagacagagatatcaaaataaattctttcttagacatggtggaaaaggaaggagatcacaaagtttgggagatgagaacacagtaaaatgcccttaagagagtccaaaacattattaatcacctggcacatgcctgtgcaaggagtgaaggcatacaactacaaagtctttgttttctcaatgcttaaggggctactgaacacactaacaggaaaagtctgaatgaaaaatccgaggatagaaaatcccatcacctcattcaatgctttcccagcttgaacattgtaatttctcagtgagtgctgtatgtgctctgaatactttcacgttttccttttagttgtgggtcataaaggagcaggttttacctcctttagttgggaaatagcacagagaaagctcagcacttttttaaaacctaaaatgttcacttttctccagcatgtattaattttcttgcatgtcccataaaaggaaagaatgtttattatgcatgcctgattgagggagagatatactgaaattatgaagacaggagattaaggatctttacaaccatggtcacatcaaatgaaaataaaactttccagcccatggaggctgtgggaaatgccgttttccactaaccaatattaacacttgaagcacatagggaccttaaagtcccaccaaatggaaattcccacagtgcgggaagtgggctttataccacagggacagctgattccctcctcatcaaagagaccctctgtgttcagcagatttcagagactctggcatttttgtaagggagttatgcaaacatgcttgactaagtaaaagggtaagaccggttttgcaaagaaataaaaaatcaggccataaaattttaagatatgctcacaacaacaaaactatattttagtcacacaccctatggttttatgggaaatgcctttccctactgaaaacttagaggtactatcacctctataaactactaccccctaatcctcaaagggagaatttaagaactctgaaagttctgatcctctgttgaattttatagaagaagctttacaaggccatgaaccaccccttctgattctctaattctggagaaaacatcaacagcagcaacaaaagattccttcttttgtttctcagtcccactgagtttgaaaaggtctctgagttcttcaaacatcaatctggattacttagtggacaaaatttaaaagataaataaataaataactcttcctggcatttgagttataaagagacacccaggtttggtgtcactgttattggttaaatcccctcagctcagggagggaatgtattctcttcctctttcctgaaacaaaggaaacatatttcatgttggatgcttggttatggagggatcagtttccaagtgatttagtgattataagccagtccttattcccccatgaaactactcgaaagttgacatttgccatgatattcaaatgaaagagaagaaaaaaaagagtagctcatttagaaaatgcatttccctttgtctatgtcttaataaagccattgtgtctattctccattaggagatctgtgtctgagctctcctaaattacctgagagcttagactgtaacacgtgactcgagaagagcctcttccattaaagactatgccaactaacagaacttcagctcatgttgtattcagaagtgaatgtctgaagtcattatatattttagtttcaaaaaaatgattttgagaggcatactattattcaagagtgtgtttatcctgtgataagtttctggaagcatcatttgatacttgtcttctttttacatggagtgggaggttgaggtccagagatacataaaagaatagggaaggtatgtgaagtgctgaaaacaagggagagaaaaaaacagagagagaatcaatgagaaagacagcaattgaacaggtcttaaaatgtctcattcctccctaataaattagcatatataggaaatctcagtttttttaaggagcatgaagggtagggcatgaagggtggatggcttagcttagtccattttctgctgttgtaaaacagtaccagactgggtaatttataaagaacagaagcttatttggctcatggttccagaggctgggaaatccaacatctaggggctacacagtgagggcctttttgctgtatcacagcatggcagaaggcaatacatggtaagggacagagagagaaaagggagatcagactgagataactaacccactcctgcaatagtaagcattcacccattcataggggcaaagttttcatgatctagtcacctcctaatggtcccacctgttaattgcatcacaatgtcaattaaatttcaacaggagttttggaggggacattcaaaccatagcagtgggaaggaagagttctgaacctaaggaagcccacaagtgaggcaacaaatccaacttcaagagtcaaaaattaaagctaatattgctggttgttgtcttagtttgacatcccatagaggcagaccctgatgcagggatttgaggacaattagcatatctctgaggcaaaggaaacacaagtaggacagtgaggaagtgagacacagaagggaaatcaaccataatgataataaaatccagccagcactggagtgactgggactcagtcccatcagagaattctgggagttagtgcagaacagatgcctcaaaggtcttccctctctgggggtaagagagctgggatactcattgactgctgcttctaggggtattcattttgacactttcagcactgtccatgagcaggctcagccaggcttgctcaccagagaaagctcccaggcacagtgatataggcattggcagctggaatctatgagtatacactgaagtgaggggagggagggtggatgagcaccagcagtgtcagctacatttgtgcagggctaaatataaagaaagggttctgcaactcccactttgtatcatacccacaaagcagctgacttccatgttgcacaagctattttatagatacatcacttcatgtgacagattatgaagcacaattaatcaggggccaattgaattttaatactgcctcctttaatgacctagcagggcacaaaagctctagaaatacaaagctgcagaggatggacgtgttctgcctttcatttctcaagacagatttgcaatgatcaagaggcgtcctgtgaatgcagtttgcaaaggacttaggcacacagcatctcctttgttctcaccacaaggctgccgggtgtgcagatgtgaggattatttcaatggtgaagaagcatcctgagaggttacgtagttcaactaatgtcacaccaagaggtatggacttgacccactttcttctttctgttttcttcttcccaccataccttgctgcattataagactactgccagttcagggaagattttagctaaagttaatttaaggcctccaagaatatttgaaactatgtgctatatctaaaaatatataaaaatgatgataaaatataaagttgtgtttcaatttctgacacactggtagttataatatacagatacaataatgactaaatctctaatttctgtcatctgaagttgattctagagcacttactacttggagagtattaaatataaaatgagcctgaactcttccttatggcatcattgccactgcatttggagagtcttctaggttcacagatttttgacccactttctttagcaaaagctcaggaagtaaagtcacacatttactcacattgcactcaaatgtgtggagaaaagacagcatctttatttctctaaaatggacttttggcttctcataagtgccatctgctgggttgtatgtgtatgtccttgtgaatgtacaagtaggttcagaggcattagaattctcaaaccttttggttgaagcctaacatatttaaaggactgtgcaaatgtcttaaatatacatctccatgatttttcacaaaataaagacagggagtcagctctcagagcaagaaatagaacatcatcagcacagcaaaaccaccacgcccctgccatctctgttactatatcttagagtgggagtaattgacataatccagtctagtaacctaggtctgatttaatatcttaatcatgcataaactattcattatgtaaaacacccactctgtcagactgtgccactctctcccttctctgccctcagcaggagagcatctgggcatttggacatggaaggtgtggggcacaagcatctcatggccagggaacgggggaggagcatctcagagctgcatcagagttcatgctggtcctaggacaagagtcaagcacaccctgctttcaccagctgctggtagctttcactcaggtaatgcacagctgaacagaacccagttctttctcttgactgggcccccatcaatacattagctccgaatgatgctgtgaacctctctcagtacaagttcctaatcctaacccagatgattccaagatggtgcttctttccccaccatgataacctttctgcaacatccttgaccattctcaccattatttctatttcccctctttaagaacatgtgggtatatctggatcccattcatgtcatatgtgaactaaggatagcttgaggacattcagtgtcaagccctctcgtcttatgcctttatcactgtgacattttctcctcccaggatcccaaatgcgaaataggtcttgaaagggatatcagacacatgtctgaccatgcgtctcaccattacatcagtctttggccactgtaggagcaccattgcccatcgccatattaaaagtggccacctgcagagtcttccttccttagagtctatgcagaagcccaagaaacaggctgcagccccagtaatctggggctactctatacctctctggatgaacttaacctgccacattcctgggggtaagaacttcaagaactgacatgttcactccctccaatatctgccttccttccttttctgactttggatatgtaaagtgatgatcttcaggcttggctctcatctttattgtattatagcctatcctatcccactgagcttttctttcttccactgcatatccaaccactcctctcttagtggtcctagacaggaggggtcttctttgctgtagaagaaagcctgtgatctcagcctgtaggtgcaactcttagtctgctcaatggggcctacaggaaccttagaaaatcttttctctcataatagaggctgactctcaaggttcttattaaacaacaacaattttgcaagtcatgttgttctctttggatttctgctatagcaattctaatgtctcttcatcctcccatcccctactctccacttcaccaatcttcccaaggcaatggatgcttcaggctgactatggagaaggcaatatagttaaaaacagaaaagagaaaaatgtgtcaatatgtctcaaaatattaatcccaacatacacaaataaagtagtaagttgcatgaagagtaattttagcatttcacccaatattcctgcatttatgcagaaccatgcattgtaactaaagaactctaatttactagcttcggaagcattgagttaagaagatttttttaaaaagtcagcagacattcatgtttatatgatcctttattgtttaaagatgttttcacataaatgatctcatttgatcctcacaaaatgaagtaagttttgctgtcttcatttggaggctgacaaaggctaaactatttgccaccagtgtatagtgatacagtgagatcaaaaaataatctttcattttgaaacatacctttcatgtaagtctgaaagtaaaaactgaaactaggagtttgagctagactcgcggctttgagaagaaccttctttgtgaaccactttcatcatgagatgtaaatcaaataggagcccattatcctttgggaaactctgaatattgtcaaaaatctctaaattcaaatgcatcagaatgttcttaaaatgcgtacggcatggttgtggatggtgcatccttgcagaggttaataaaaagtgcaaagtgatgttttccttcctctggcaataaccagaggcaggacttggggctctttcactctggagaacattaaaaacttggactcttttcgggacacaaatgtgaaaaccagcaggttttcagtgttctagcagctgtgcccaaagagaaatcagagataaatggcagctgaggaattcttttaacaaggagaagctgggattgtatctgtgagcttctgttttgcacattgtacttacattccttacgttattttcaagtaccagcagtgtctaattcatagccattttggaactgagcttaaaggaatcttcttatccacattctttggcaaaacagaccagagagaataattgtaggagattggtcagggtggtgggagaaactgtaggaaaaacgcaaaccttcttggaaggccatgggggttttgcaaagcttcggggaagaatgagcagttcttaccctggggcaaagggcgagaagtaggtacaaaggaatgcaggggagtttatcagaataggttgtttactcatatctccagaaaccgggcctttaatcatccacgcaattacccacaagtgtattgactcaaggcctttgtcattaaatctacactgaataaatgcccgcagtgccagctggtcagggccacagctgctgactctttacagtaccctctttggggtctgtgggtggccctggtctcctagcccactctttcactagatacctgtgtctgagtgcatttgttcatctgtcattcagccagggtctgtgggtcagacctggcaaataattatggtgtgaagaaggggtcagaaggcccaggagcagtggctcacacctgtaatcccagcattttgggaggccaaagtgggcagatcacttgaggccaggagttcgagaccagcctggccaacatggtgaaaccctgtctctactaaaaatacaaaaattagctggtgaggtggtgcatgcctgtaaccccagctactcaggaggctgaggcaggagaatttcttgaacctgggaggcagagtgagccaagatcataccactacactccagcctgggtgatgggaatctatctcaaaaaaaaaaaaaaaaaaaaaaaggaggggtcacagacctgaagaaggagatagatggcgcctcagtctggagcatgatgtgttgagggcacagatgggcacatggaacattccagcactcctcagggttctcagaatacctgctgacatcacagaggggtcagcttgtagaccactggacagcaaaggaaaggggacctctcatgctggaaatggattggaagcagaataagtcgttttttcagtaattgtctaggccatgtgtattagccaaaaataaatttaaatctgtagttaaatattctgtttctcacagatatcctttaaaatacattaaaggatagcatcatattgtccaaaataataagtgggttttgatgtctttttctctgttcgcaggccacctctctttgccagtcttgacaaataatttcttagtgaagcacctatttcaggctgagccacaagatgtcagcctaagcttagtcattttgaattttcctggcccttgaaacaactacattttttcacttttatgaccaagaaaaagtctgagaagctcacgacccctcaggattaggtacagagaccacagcagctgcttgccctgggagctcttcatgcctgttctcagccatcttcagtgaagatttcacaggataacccaaactggctcctttctgtgacaccacccagggaactgcattccaagtgtgggtgtacacggatctccaccattggtccttgctctctctcctgtcccatcctttctccccttcctcagttatgctctggggcaggtgagtaatcctgcatgccttcggagatgtccatttgggaatgagatcctacctttccttttcccaggcacccccagccttatgagggattcccatcacgtggctttagagatgagaaggcatctttgccatgaactcttgcttcatcaggttgaaactcactcttcctgtgaaccccccacttctctctattctttcacatgctgggaaggggactgcagagacctttagggatagtacagaggatgtgtctcctcgtggccagcccagggcagggactggacccagtggtttgcagccctttttagaaggttggcatttaactcactttgtccttaggtttggttcattgtcatcaagatggagcgatgatgaatgtcctcctcaacatcttttacattttacactgataacagttattagaaagaacaaagttggacttgtggatcagtgtgcagtactagagaaaagaggaaaactctaacctattttgagtacttactttttttcatctaattgtcacaagacagtgaagttgctatcaccttcacttgataaatgaggaaaatttgagctcagaaagtattcagaaactcgttcagggtcttagaatgaatgagtgagacagaaacacaagtctgtctgattctagagtcctgtttttttctttcattctttccttttgaaaaaattccctttactacttctgcatttgatacaaagtggtatctggtaaatgggcctgaaaactttctaaataactagttttaaataatctctgtggaaatttatacaaacaaaaaacttccttgaaaaagtataaactccctcttccagtaggctacgacagactctcaaatcatccgcttcaatcatttagagctgccatgtgcctttggcctcctggttaaaactacatagtcagaattggaaatacaggtagctattagtaggaacaaagacagtgaatgtccaggacagaactgagctgcatttctaggtttgaatggaaccagtaataaaagtccaaaataaatgatcacctccaccattcactcttctatgatgggtgtaatgtattattttttcttttttaaaaaaaattttattttaggttcaggggtacatgtgcatgtctgttatataggtaaacttgtgtcatgggggtttattgtacaggttatttcttagcccaggtactaaacctagtacccaatagttatatttttctgctcctctccctcctccaacccttcaccctcaggtaggccccagtgtctatttttcccctctttgtgtcaatgtgttctcatcatttagctccctcttttacatgagaacatgcagaatttggttttctattcctgttagtttgctaaggataatggcctccagctccatctatgttcctgtgaaagacatggtctcattctctttatggctgcatcatattccatggtgtatacataccacattttctttatccagtctatcattgaagggtatttaagttgattcaatatcttggctattgtgaatactgctgcagtgaaatatgcatgcatgtgtctttataatggaacaatttatattcctctgggtatatacccaataatgagattgcttggccgaatagtggttctggttttagccctttgaggaattgccacactgctttccacaatggttggaccaatttacacttccaccaacagtgtgtaagcatttccttttctctgcaacctcctcagcatctgttattttttgactttttaataatagccattttgcctagtgtgagatggtatctcactgtggttttttttctttacttcaataggtttttgggggacaagtagtgtttggttacataactaagtttctttagtggtgatttctgagattttggtgcatccattacccgagcagtgtacactgtatccaatgtgtagtcttttatccctcaccccctcccaccttgtcccccaagtccccaaagtctgttgtatcattcttacgtgtttgcaacctcatagcttagcttccacttatgattgagaatatctgatgtttggttttccattcctgagttactgcacttaaaataatggtttccagtttcatccaggttgctgtgaatgccattattttgttcaattttatgtctgagtagtattccatggtatatagataggtacagatatagacatatcacaatttctttatccaatcattgattgatgggcatttgggctggttttacatttttgcaattgggaattgtgctgctataaacatgcatgagcaaatatctttttcatataatgactcattttcctttgtgtagataccctgtagtgggattgctggttcaaatggtaactctgctttttagttctttaaggaatatttacactgttttccatagtgtttgtactagtttacattcccatcagcagtgtaaaagtgttcctttttcaccacattccctccaacatctattattttttgatttttttattatggccattcttgcaggaataaggtgatatcgcattgtggttttgatttgcatttccctgatcattagtgatattgagcatttttcatatgtttgttgggcacttgcatatcttcttctgagaattatctattcatgtccttagcccactttttgatgggattgtttgttttattcttgcttatttgtttgagtcccttgtagattctggatattagtcctttgtgggatgtatagattgggaagatcttctcacattctgtgggttgtctgtttactctgctgattgtttcttttgttgtgcagaagttttttagttcaattaagtccaactatttatctttgtttttgttgcatttgctttggggttcttggtcatgaagtctttgaataagccaatgtccagaagggtgtttccaatgttatcttctagaatttttatggtttaaggtcttagatttaagtctttcatccatcttgagttgatctttatatcccatgagagatgaggatccagtttcattcttctacatgtggcttgtcaagtatctcagtaccattcgttgactagggtgtccttcccctacttcatgtttatatttgctttgtcaaagatgagttggttgtaagtatttgcctttatttctgggttatctattatgtttcattggtctatgtgcctattataccagtaccatgctgttttggtgactatggtcttacagtatagtttgaagtcaggtaatgtgatgactccagatttgttctttttgcttagtcttgctttggctatgcaggctcctttttggtgccatgtgaattttagaatttttttttcctagttctgtgaagaatgatggtggtattttgatgggaattgcattgaatttatagattgctactggcaatatggtcattttcacaatattgattctattcatccatgaccatgggatatatttccatttgtttgtgttatctaaaatttctttcaaaagtatgttgtagttttccttgtagaggtctttcacctccttggttaggtatattcctaagtattttttttctgcagctattgtaaagggggttgagttattgatttgattctcagcttggtcgctgtcagtgtatagaagagctactgatttatgtacattaattttgtatcatgaagcctgctgaattaatttatcagttctaggggcttttggaaggagcctttagggttttctaggtatatgatcatatcatcagcaaacagtgacagtttgatttcctctttactggttggatgccctttctttctcttgtctgattgctcttgctaggacttccagtaatatgttgaattgaagcggtgagagtgggcatccttgtcttgtccgagttctcagggggtatgctttcaacttttccccattcagtattatgttggctgtgagtctgtcatagatggcttttattacattaaggtatgccccttctatgccgattttgctgagggttttaatcatagagcaatgctggattttctcaaatgcttttgctgtgtctattgagatgatcttgtgattttagtttttaattctgtttatgtggtatatcacatttattggctgtgtatgttgaacatctctgcatcccgggtatgaaacccacttgatcatggtggattatctttttggatatgctgttggagtcggttagctattattttgttaaggattcttgcatctgtactcaacaggtatattagtctgtagttttctttttttgttatgttctttcagtataatgtattttttgaaggaaaacatgaataaaccaatgttgtatctactgaagtcattattggtgctctctctcacttgcaacctgccttcacctaaggtcatacgaagcttctagggttccctcctcagtttcctccttctagggttccctatcagattcagattcaccactttttttgtaccaaacttattttaatgttccctacaatgttgaaataaaattcatagatcacatgacctatctagacacaaaatctttaaaaccatcaatatattaaactataatacaaataaaacataagacaaatgtctaataaaaataaatgtatataaatttgcaaataatcaagtatgattaaatttgaagatataatgcaatgatatgagggttgtatctgtacatataatgccacagctacaaaggcagatgagtccaggtgtgtagtagtggtggctcaattaccataagtattgctgccttaatgttattttctaaaatggtaaaataatctggataacattccaaacaaaacaagtagaatttcccatgattcacataatgatttatttctgaaaaatttaaggtatatgaaaattatgccaaaaaatgcttttttttcatttgttatacagaattagattccaaaccagaaagattataagcaagctttttatcctcatgaatgcctggggccactgaaaatctgtgggacactgatctgtgcattggaggtgtttaccatcttcagtgcacagagctaaatggctcaatgccaggagcacacccttcctaattaaccaaaattgccttcaaaagtttcaaaactttctgggaggccatactcggcttcctgaaaacttaaattttgagcacacttgaagaggcccttctagtcaacattggtcacaagtgagatgctcctggaccaaagccatcctgcttcctggagcctgacaccgctgagatttcaggccttagttaggagctgggaggctttaccaaggttgataaccaaccccaacctagccttctcagatggacctcatgaccataccccatgaagcactggctgcttcccagaatgtagccacccagaggatgtaggtccctttccagtaaagaaaaagtttacccttctctcttccttaaaggcatcttcccttccccattatactcactccagccacggacatcacaatctcttcaaattaagccagcagttctcagaacgtgatccaagaagtcttgaggtccctgagaccctctcagagagtctgagagatcaaaaatattgatattataatgttaggcaccatttgccttttttattctttcaggagtgtacagtggagttttccagagactacataatgtgataccaggatagaatgaatgaacacagagcagacctgagaatccagctgtcttctttaagctattaaagagattcataaaacaaacacaaagccactgatagataaaaacctgtgtgaatatatccccttgggatcctcagttacttctaacagtgtcaaggggtcctgaggccaaaaagtttgagaaccgctggtttagactttctcaaaagacagaaaagtatttactttcaacagctactatttccacagacccactagcccctgaagctgggaaactaagattcagagctgattcctttcctacagtgatgcgaagagaggggctggcagacagagggaaaaaaacaaacaaaccaaaaatggaaacaacaaagctcagactttcacctcagtagatatcctcggctcacatacttatcaggcaatgaacatgacaggctgggaggagggtagggtgtgtatttcattttccacacccagataatagccatttaaaaataagtggccaccactggtaataaacagcactcgccattcccacttacaactcactcggcttattcattccttcagttaagagctattgagggcctgctatgagcagggaagaaatggagtgttatcctcaccaactagcttacagctaggaagagacctaaaggcatagagaaaatgaactctaataaaagttgaaggtgaaacggcctaacacaaaggcaaaaattcagttctatagggattctgaagcttgatttttctgtttggagcagtgagcatcatagcaagttacaatttgagccgagactctggagaaataggctgcagagattagacatagtagggaaggacttgatggtgaagaatagcatgaaaaaagcagagaggcaagaactggggaacaggttaggaaacagtcagctatagctagtttggctggaatgcagggtgtgtggaatttacatatgggagattgggaaataaaattagagatgtacgtaaggatcagatcacagagaagtttcactgtcaggctaaggttgtgactaggaaaccataagaagactttgagctattaccttacaagagctgtgccttagaacagtgagccttggtgtacagtgtaggatcaattaaagtaggagaaactggaaaagtataaaataaaagacaggaagaagaaccaggaaataacatttatcatgggatgcattataacagcaaacattggcaagggtatagaacaactatgacttttgtacaccgctgcttggagtataaagttgaaaagtcacttctcagcattttggcaatttcctgcaatgtttaacttgaccttatgacccagcaatttcactaagtgtttgcccaaaacacaaaaaaacctaagtccacagagaaacttgtacaataatatgtccagcaactgtgttcaaaatatctaaaaactggaaataacccaaatgtccatcaaaaaatattaaataaattatagaatattcatataatagaatatttaacaataaaaagaatgaactatgatacaccacaacatggttgagtatcaaaaatgtgttaagtaaataaagagtatgtgctctgtgatttcacttaccgtgtttgaaatctaaattcagagaaagttaatcttttatagaaattatagaaatcaaatagtggctgcctggggagagatgagaagggaagggtggggaatggactggaaggagcatgagggaactccctggaggaatacaaatgctttgcatattatttggggtagtagtacacatattatacaattgtctgaaactcacaatctgaacatgtgatacctgtgcgtcttattttgtaatagttctgtcttagttagaaaaaattctaggtcactgaaaatgtagcattcactcacccttcctgaaaataaaacttacaactaaaaacacttatttctattatctgtggaatcaatcaaaattaatacaatggctgaaatcgtggttggaaaaaagcttattagtgagcaataaaaaaaactataggtgaaaataaatgtgcttagatttttaaatcaatttactaatttctgtaaaagacaattaatgtgataacattaatacttaaattgtggccaaaaattctgaaaacagtggtgaatttaaagaaaaggacattattttagtcttgctgcagacaaagccaatattactctcaaataccatatttttatatttaaagtatttattgtagactctagtgaatgtctttttgattaagctcatggttcataaaattggctttgaaaataaaactgatgtgtttgcacttatttctcacactgcaaagtaatatagtgctcactgaaacgtgtctttctatctattgagtagataaagctcaggtttaaaaaaaggtagcatatagctttatgcaattagcttaggaagcaaaattaaattacaattcatcatctctcactcaggtaagctctatgtatatacttaaggttacctgtttggaagtcaggattgtatgttatgtttaaaaacaagatagagatctgtggagtttgtcattctagtcacttgcttgggaagtaaacatgagttaaaagtagttggaagtccaagagggaaaatatatccttgcactgtgtgtaactcatgtacctctctctagagggaaagctaagctgctacctctggagggtgttttccagcgataagcaaatacgcagtgataagatctatgtagaaatgggatattgtgtagaaatgggatattgtgtagaaagttgattgagtggagagggtcatgcagtgtaatctcctgaaatacactataattatttggatctttccaggttcccactttggccacttaattctctgaacctctactacatgaagagactagaacttgattagaaaaaaatggaatgactcttaatgagcaagtggatgaataaattgtggtaaatccctacaagtgactattagaaagcgaatgagtagagttaattaattccatattgacattgtgcactgtttatgatacattatgtaagaaaaaaaagcaagattcagtataatgttcattataataatatattttggcaaaaacaaaccacaaggacaaaaattccaatacagatctaaaaacagtccaacaaacaaatgtcatactagaagaacaaataatattgtttggatttaagaggaaaaatttgacagatctgtttataatgcacacagcaactgctataaggaaacagctcaggaatgcatagactatgaaagaaaaaccaggaaagatgagttagcatggatagatggatgcatggatggatgcatggatggatgcatggatggatggatggatggatggatggatacatggatggatgcatggatggatggatggaaacatgaatggatggatggatggacggacggatacatgaatgaatggatggatgaatgggtggatggatggatggatgggtggatggatggatggatggatggatggatggatggatggatagacgtaaatgaggaaaaaataaagggaagaaggaaaattatttttcttcaacaatccaaagacactgttcctttattttcacagtatcttatgcttttaataataattctattgctgaaataactttttttcctcttcatccttagtgttctcatatttcataatcaggatctagatatgagtcttttctatttaaaaaaacttttctttcagctctgaaaaatatttttatattgcttcttagataatttagaaccctcaactccccgtgttctttctttctggcataactacttgctcgctgttgtaccttcttgatatatcctttatgtctcttattatttctttacaactttctgtcttgttttcttgttgttctacattttaagaatttcttcactttttgtctcttttacttaaaatgattctttcatacactttattccattttatagcatcctgttcttgccttatggatacaatagctctgtaaattggtatttccacgttctcttctgtgccctgaattctctctctctctctctcacacacacacacacacacacacacacacacacacagagagagagagagagagagagagagagagagagagagagagagagagagggagattatattatcctaaaacaggagactaggagttggaactgtagttagaaaatgagagatgtccacagatttctggaaaataggtaacattattaggttggtgcaaaagtaattgcagtttttgcattactttattacaaaaatcacagttacttttgcaccaacctaataaaaagtggtgacgaccaaggaataggtgaggaaaaaggaagaaaagttccatcttagaatggatgctgaggaatgtatgtggcagaagaagcctactgacctggtgaaaatgggttgcagttccaataccgagatgactccaggtaattcagaactttcactattgtttatgagatcaaatatacaagggtatgtaatacatatagtttaaagaattgagcgtgtttccatcactcagttttaaaattacccatattttagaaccttccttgtgtctctttcagattacatccctctctcattcctgatgttgatttgtgtgtgaatcatttttctctttcagtttttaaaggtttttctatctatgtatctgtaaatacatatatcagatatgatttttatataattttatatgatatatgttatgtgtgcatataacttagttttgcttggttttgaacttatataaatagaattatgctataagtattcttctaagacttgcttctgcattcaacattgtgtttttgaggttcatccatgttgaggcatttagctgttatgtatttattcatttttcactgctgaattttatttcattatgtgactatattactatttattgattcagtttactttaatcaaaattacgtggttctcaacttggggctagtctgaatcatgatgttatgaacattcttatgcacatattctattacatgagtactgtacacaattctctcttgaaatagattcttgtattacagaaatgcataggttctgtaccatactagatgctaaactggtttccaaagttcttgtgctgtttattacatcccaaccaacagtggatggaagttttagttcccctacatcttaatcattttcaaacatttaaaatcttaccaaaatggtagtatacaatggtgatccattttggttttaattttaattcttattactacaaatacattttaggattattttgagccacctgtattttttttggctgtgaaaatttttgtttatgccacctgaccatttctccccaagatttcgagttttttcttaaactgcctataaaagaggctatcagtttgctcatgatctttgatactcactaacagtcatatttgttatttatgaaatttccatatggtcctccacatttctcagttcccttagagttatatggaatcacatggctaatttatgaggaaaggcctattacaagtcacttctaagccaaagaatttacaagctggcacatgaccctctcattcttgctatccgtgccacagtgacaaaacaagccacagggttctcaaaagtacaactacaaggccaggacggctctgtttgcctggatccctgagtgattctgaggagcagagcacatacccacacccactcactccagacaactcacactggatttgtactctgagaaatgtgaggagtaatttgttactactgcatagtctagtctaacactgactatacttgctcttctatgaatcaaatttccaggcaggcagaagtttgttctgagctctgtattatatttcacaggaccatttgtctattccagcatgaacagcatgctatctcaattattataataataatatttttcaatttcagtagaaaaaaagtctctataacttgttctgtcttcaggggtgtttcgtctatttttgcctttttattcttttagataattttagaatcttcttttcaagcttcatgcctaaaaatccctactgagattttgcttgcaattgcattaaatatacagatcaatttggtgagaatttacatctttggtatactgaatccttcatttaggtatgttgtatattctgcactttatttagatttttaaaaaatgtttttcaatatattttatttttccataaagcatttatacaacttttagtatatcaatccctaagtaatttatatttttatgtttcttttcctaaatggcatatgttaaaattgcttcatacaattaatcactatcggtttatgactattcaattaattttatattttgatttgtatccagctaccttattaattctattattatttctaatatttaactaaactttcttttaggtgtataatatagacaattgtatcatctatgaataatgaagattttattttcgcctttcagatattcatcttacctgctgatccttcaaagatctctagtatcatcatgaaaagaaattactatagcaggcattttttcttgctattaatcttacaagaaattctttcaatctaccaccattgctagtttgccgagaggttgttttgtgttttgttttcattaatgaatggtaaattttgtcagatgatttttctgcatctattgagatgatcagatatttttctcctttaatttgctaatgaaataaatcacattgataagttatctaatatcagactgagataagcaaacctggcaatgataaatattataatttttatattttgctggatttggttcattaatatctagttgagggtattcctaactgtgctagtaagtaaaattaccctgtaatattcatggttttgtcagaatttggtatcaaggtaacttcgtttcatccatgagtaggatagcatttctgtttttaatatactctggtatagattgtataatacctgaactatttttcctaagaatgtctagtagacctcactgaaaatgtggggttagtgctttcactgaaaatttggggctagtgctttctgtgtggggagttttttagcttcaaatgtaaatcttttgaagtttctagctatatccaggttttcctttgacagtgggtccagtttggattacttgcatttccttggaaattaccaatttcagctaagttttcaaattaattggcatatattattctatattctatatcaggccatttttcttctatctgctggttttcatcagtgatatcacctttccttgtgcattgtgaatttttgaactgtgagctactaatttttatttgaaatttaatctctgggaattttttaatgtcagtttgaattcgaggttttacaaaaggatatacattttcatctgccaggtgcctaagggtattaccaaattgctaccacttacattagaagatctgagtgacattttctagactgcacaggcagtgttaaaatgaactaaaacccacttcagagctggtttatgattacatatttttagaagagacttcttcattcaacactaaggttaaaaaccacaagctttattgatgttcctttctgcacagagagattttctttcctagttcaccttacctccaggggcatagcccttaaggatccaagcattgcgcaatctcctaagagactttcactttgagtgggccctaaaatttacctcccataccctgtatccagagagctaatcaaaagctcaagttcccccacgcttcttagaatcccttaaggaagctccagctgcagtgtttacctgaattataagattctgctttcacttctatgtggaggctgcagcttgcagattctttttttcctaatgccagctcaatgaagcacttacataatttttttaaaaaaaaattccatccaacattttcattgcttcagttagaagagttatttagtgtatctaatctaatctggtaaattgcccaacccacttctttcatccttattgaataaatcagtgctgccaaacagaactttctgtgatgataactgaccaattcagaagccaccagccacatgtggtaattgagcaattcttttatatgactttttccctggctatggcattctgaattgtgtagccaagcatctcctctactcttctatatggaattctaagttttacctcataggaacattatgtgtcagcaccgtcaatgggtgaatgaaggtctatttctgcacagttatagaatgtagccactagccacaagtggctatttaaataaattaaaattaagtgaaaataaaagtgcacttttaaaatcacgagtcacatttcaattgctcattttcttttttgtaagagaagaatttctggatgtgtggcatctacctggacacatcacaacaaaggatttagcataggttgtgggattgcataagccaaaaacagaaacagagcataggaaatggcaggaggcactccccaaatggcttcattagaatgaatcttatctctgcagccctggccttacctaccagccctaatgagcctgctctgactcatactggcttcctttcatgcccagaccctttcatgcccggacccataaacacttatacctgagctctcatcatggagtctctccttgttatctctggcatctaatctctccttggaacctcagggaatcagccattcagcagtaggcccattcatagagggtctcctcccaaagctgctgcaaccgaacacacaaaatgtctatttccttaaggaacatggatgagtgtttaaactgtatctctttgtagagttacattctgcataggataggcacagttgtatgaaaagagccctggacttagggtcaggagaaaccatttctaaccccagctctgccattagccagttgcttgtccaagtcccatggctgtcctgggtacagtttctccaactgcaaaagaagagtgttcaactccatcaaaatagaaatccctttcctggagtctaaatgggaagattgagttactcaaagctcacatatataaacaggtaggagattggacatgttaagattttctgtttctatgctgctgggtccttgtaacgggtcaatctcattagaaggaaaaccaacctcaaactggtaactggggacttgatgatgaaagtggtataaatggggactttggggacacagtctggggtccatattacacgattattcacagtgcaccataggaccttcctcattgacatggagagaaaggcagcattaacctggcaggcctggtggggattccatgggcccagggctccttctctttttgttccatctggagcttttcaacctggccatggggggtggtagttttgagccccccagtgtcactataggacatttcttccatagcaatcattattattcctatttctcttagttcctctacactccatcctgaatgaccagttttctagtttagggaaaattaaacacttattgtttccaagagtatttctgggtcatttcctgggatttttgtcctctctttaaggataatattttgtttcccattaacatgcatgtcacttctataaatggaaacttcttccacttattgactgtctgaaaaattggaaaccataggataaacttattttcaaataacatgtcagtaatattttcaaacagtaggcactaaatttaaaattgtgtatttgttagttggaaaaaagtacaataaacacaccatagggtacccaaaagtctagaaacataggtgaaatcatatacatactatacattatacagatggggaaattgagtttcagggtggctaaaagctcagggttggtaggtaacagatcagatccagaattcaagcccatattggtttgcctccaaagctatgtagctcgtcccacattaggtgtaaatatctcaaatcagaaacagccccctaacacgtgtatataagttttctcattgggagcttataaataacagtccaacataccaaccaatcaccttgagagtgattgaatgaaattgagatgctttctttaaatatattttactgtatatatttgaggcttacaagatgatgttatgggatacatatagataatatggttacttattgaagcagactaacctatctatcatctcatagttatttttgtatgtgtgacaagagcagctaaaatctacttatttaacaagaatgcctaatacaatacaattttattaagtttagttctcaggtagtatatgagatcgctaatttgcttgtcctacatagatgctttcaatgtacaatgggagaattaaactaagctttggctacttcaagatgtaaaaaacaaattatcttttcattatcttctttttgttttggttttttttttttttcctgagatggagtctggctctgttgcccaggctggagggcaatggtgcagtctcagcttactgcaacctccacctcccaggttcaagcaattctcctggctcagcctccagagtagctgggatcacaggcgctcaccaccactcctggctaatttttgcattttttttttttttttttttttagtagagatagggtttcaccatgttggccaagctggtcttgaactcctgacctcaggtgatccacccgcctcagcctcacaaagtgctggaattacaggcatgagccaccacgcccagcctcttttcattatcttttctaaagaattttctgaaaacattatcttttctaaagaattttctgaaaacatttgtttacctttcaaaaggaaacattttcatcctaaagccaattctatgtaccattaacttgtcttcattctatgaccttacatgtatgtgtaatgtcctctatcagaggaagaaatctagtcacagggtgcagtcatgtctaactcgtttatccaatttgtggcacagtcccctcagcagctatgatgacatagccttaaggaatcatcaaatgtttgagctgaacaagaccttatcataggctattccaacctccccacttcacagattagtagattgaggcccatttattcacttggcactcacctaccgtgtgccttcaatgggtgagaaaaagatgaattacctcaagacatcaaatgacaccccatgccagagttggaataatcatatcaatagttgagacaatggtgatgagaatgcttaggatttaaatataatagcacacattcgacatgagttatgaaggtattgaaggcaagaggttttgtgaatacaaactcagtgagtacaagggaaggaagcctggggaatgtctttaaacatgaagatctgaggacttcagagaaatatttcaaagcttatatagcaatgccgcttaagttggagaaacatgacttgatggaatagttgagcatttaacaaagtattatcaagataaaggcaagctgtggggcggcctggtgcccaaaaggtacaaggtggagcacatgaggctctccagccttcagacatcaaaaagacatttctgccctgggtggaaccagtttctccagactcatatctttctctcctccattctgctctgcaggtgaaatctaagggcactcttacctaaacagatactgaattacaaatgaaatcaattgtccttggcaaatcaaggaggttaaggggaaagataaactctgttctacatcacctccctgacaaggcagcaagcccgcggataagagcaatggagcactgacgagtgtaatgaaaattcacaagtttgttctagaaatgactggaggagacaccacaggccccgtgctcccaagacatcaccaattcttctaagggatgcttggcctctgggcacgtctaattacccttcaagcataatgtggttataaagagcctaagctgctgttgtatatgcctcccaagtctccccccatcacctctggaggtggggacttaaccagagaactctccctttggagtatttatggcctcaaggaggctggctttaaaactgaaatgtttctgacacctgagcatctagtacacggagatgggtcctctttgtgtctaaactgtatttgttctaaggactcaagtgtatccacacaggtttggagggcatgtgaggtgggaccactaagacagatttgatggagatctggaagtctaagccacaacattgattcaaggatactggagcagtgtcacaggtaggggagtaccttccttgaagtagcccctgagtatgtttgagatgaaagggtggatagagactctcatagaagagcaaatgaaaaggtaaaattgcattattacactctccaggacacttggagagaacaattagccaacagcattggggtcagtagaaccaggaactggcactctcagcacaaatgtcagcagcctccatattacagatcagctgatttcgtgaggacattggcaggctccaggcccaaggcagtagtggccatgccctaggatagttagggattgattagcacaaggagtcaaagcagagcgatgcctttttcccttcttcactgggaaagaaatgtagagtgtgtgtcctcttgtgtccccttcgctaagacaataggatttacttgcagaatgtatgtaagaaacctgcagagacatcccaaaaagattcagtaggaatttgagagaggttgtccttcttgcagagcatttggtgctggtgcaacctctaaaatccaggtcaagttaaaaacaaaaaggccgggtgcggtggcttatgcctgtaatcccagcactttgggaggctgaggcaggtggatcacaaggtcaggagatggagaccatcctggctaacacagtgaaaccccatctccacttaaaaaaaaaaaaaatacaaaaacttagccgggcgtggtgggatgtgcctgtattcccagctacttgggaggctgaggcaggagaatcgcttgaacccgggaggcagaggttgcaatgagccgaaatcgtgccacagcactccagcctgggcgacagagtgagactctgtcaaaaaaaaaaaaaaagcctgtttctttttttttattattgaatacaatgtccttgtggaattcaactacttggtatattataaaatatggtttccacctttctagcattcttgtgggtccttcggcatcttctttgtgtactgccatgagcatttcctcacaaaatagcaccagtcaagataagaacaataacttctttgaaaggagcaatgttagtggattccgaaaataacatacagcaatttctactgcactgagccaattgccaagaagaggttctagaagacataatttattctatctgtggctgtcaaaacacatctgctgccctttacacattttgcttaaaagatcacctccatgaatactgaatccattacatactgatgagggttggcctttatatgactataaatatatgtatgtttgggtgaatatatgccacatttgtattcttgtttattttgttctacagtgagtgtatttattcaggcagtttccaacacaaacaactgatatacatatgaataagacacaggggagtttaggtgtagaatgccacaccttcttgctccaattcaggacaccgatggagttaccaaagtagggaggctctaagccttacctagagagaattaacaactgattagtgttcattagtatcattctcacccatatgctgttgagtaggagagattgcctcttatactttcagataaaactgtgtgtgtgctgcttttgttcactagatgagatcctgggcaagtagcttcacctctctgggctcagttttctgattcataaaataagaataacaatatctgcttttttctccctcataggatgattgtaatatatcattacataaagtggaaaattacaatgcaaaaatatttcttttttattacaattaccctttttttaacaaaaaagtatcaattgaaaactaaatggaacccttaagaagagtccctctcaaaaactaaattattgtaatgctgaattccaaagtaatttattaacagtctttaggatcaaagctgtctcaatagctacaggcagtctgcgtgggatattttgtgtcctcaggatgaggagctttgcttttgggaatctatcccatgttagtaacagaagcagggctgttggaggtacagtgttccctgagacccaaggcagagactctctttttctgtaatctgggcttttcataattcagggtgatacacaccataatttattgttctatagtttggaggataaagaagtgaaaatcacatgtcagagctttctcatctgaaaagtaaacactgaaaaagaagtgcaagtggaaaaaaatattaactaactcatacacttaatttgtttagagtgcagatttcatgttctatgttttttactagaatttaaaatgaagttaaccaagtttgttcccacaggcactggtttcaccagcacatcaaagatgccccttggccccttagctgattgcaagaggtccttcatcacgtgagcttttggcaacagaaaaataaaaattttaggacgtttacctgttatagaccccaggggccagacatctaatttctattcctctaagtgtctcctctgttctctttgtggctctggaaaccaagaactcttatctgtcaccatgaagcaggtggttgctggggatgaggctgatgggagccccaccccttccatgaagcaaattgagcccatgtgaacagggttaaggatggggaatgccagcagtcacatctgggtactagttcctgccccaccccatccgaagtaaacagaggaaggggtggcagcattttactaactgaaagtgaggctcaagtatttgtaaatgtcagaaatctaaagattaacacttaggaaaatgttatacttgccaaaaaaaaactaaggatgctatacaattttacttcttaaaaaatcaaccaaaaatagttctcatatgcaccaaaaataagcattcaataaaaatattcttcatgggttttacgttattttactagtgtttggattgttcatgaagctacgcaggtggaatcatatgtagactcttacatgcatgccatttggtattagatgaaaaattcacattagtaataattctatacttagaaattcatgtcacataatttttttgtccaatacccaagtataagtgctttggaaaaatcaatgacttttaaaaagttttgttgttgttgttgttgttgtttgtttttgtttttgttttgagacggagttttgctcttgttgcccaagctgaagtgcaatggcacgatctcagctcactgcaacctctccctccctggttcaagcgattcttctgtctcagcctcccaagtagctgggattacaggcacccgccaccatgcccagctaattttttgtttttttagtgggagacagagttttgccatgttagccaggctggtctcgaactcctgacctcaggtgatccatctgtctcagccttccaaagtgctgggattacaggcgtgagccaccatgcacagccaaaagtttcaactttttaaaattaaatttctcttcagaaattacacaataacatgtattcaggctcactggtacaaagacatattaagaaaaagttaatatgtagatccttatttccaaggtagtcagacatatttctccatgactccacaaatgtgtatcatgttttgtaatatttttacaaaatgagtttgtattatttacattactcttcaaccttctcatctcactttagcaatcattcatgggtattcctccaagtcaatcttgaagatctaattattccttattatacctgcaaaatgtttcattctatggatgtaccacaatttggccaatccttgcacagctgatgggcattcagtctgtgtccaggtatattgttttgttttgtttgtaactgtttatttttctactacaaacagttttatgacaccttgctaaacttgatacacatatctttgagtcctgccactgttactaacatgggatcgatttccaaaagcaaaatggttgggtaaaagggcacatgcattcttagtttaccaattattgattgtttgttttctaaatgctgtagcaatttatacactcaccatcttctctttatgagagaaacactcaaattattctcttctagctattttgaaacatacaatagattattgttaaaatattctatattttaaatagaaaagcttgtacatgctattgcaaagattttttaaaaactaaaagtcaaccgacagctatccaaatgacaaaaatgttaaagtacagtaacattcaaaattgagcttgagtcattgcttatttttcccaccagattttaattacactaacaattttgtaatagaacagatgtagaaaggaaccagcatcccttcctaaatattttcctgatcttgctcatatgcatttgagtcttacagatatggttctagcacattacaatttttcacttttaatttttactaaacattaataagataagtacttttccattaaaaggctacttaatattttatgatttggatctataaactacttaataattcacctatttttgattgtctaggttacctcctggtttagtaattagaggtaactgtgaagtgaaaatattcatgaatgcaaaataattctttttgaaatattttctttggatacatttccaaaaacagaatagcataaacatgttaacaggtgttgagacatattgccaaattattttccaaatgtgttgcacctacttagctaggcacaagcaaagaattaggtttatgaatggcatttaaacacctttaaagacccagaaatcattatttttcatgagttttttggcactttaaaacaattttatgcttctagaaaccagtggctattttgggggagatagtgactagaagagggagcaagtgggtttctaaggcccctgtcattttctgtttttgactgaggaactgattcctgggtgtgtttagttcatgaaaactagaagagcaggcaactgaggatttgagcactttctctatgtatgttatacttccatgaatgttcaaggaatgcactgcaggaatttcttagaaatgtcagtcacattactgaaagacacaggaacaacctggaacattttgccaagcctctctttggtcagaattagatttctatttatgctcatacattcatataaaccatcaagtatgttcaaaagcaccaactatgtggctgttaaaaaattaactgcagtccaaagtgatgcaacatccttcattttctaaacctcaggagcaatctgattatggcaccattaggaaagcaaaatctatcaacttggagcttactgtttctcagaataaactcaactagggacaaggcctagaggggttaaatgactggtctaaaatccacagctaactggtggcagaactagaactagaaccaggtctcaaggtcaccatcgcagactttcttcaatataacagattgccttctctcctgtctgagacaagcatcaaaaaaatagacactgattaaagtctttcagtggcttcctatcaggcttggtttaagttctccaatttagaccttccccaatttagtgttctctgtcctatgtttttgttatttcccaacacacactgtcatccttgggagaactagatacttttatgttttgtacctgttgccttttttacttaaaagatccgccagtgctcagcctttgtacatattacctcatttaaaatatccacacaagagtcctataaggtaggttttacagataagaacttttctaagagcacatagctaccacattacatccagttctttttgatttcaaaacccatgttctgaaccactcttgcctgctgcctctgttcttctgtctatagcaactgtgagtcttgacagttatatgcaaacttgtagacagtgtctccctcatttgctctttcttacagcccagccctttggctaaacatttttactttcccaatttacagttgaataaatggcggctcagaaaggtgaagtgacttgctcaaggtcacaccacgcttatagtctgtactgtacaattccctgattctatatgatatttcagttaattatctaagtatttactgaagacttacttgaagagcattaaactggatactctaggaattaaaaagattgttcatgaattgcttcctgtatgttcatgaattacttcctgtgtgctcatgaactgcttcctcgtgtgtctcctccatctagtgtatgaaaccctaaagagaacagagctcatcccgtattgctcatcagactcccacaatgcttagtccaacctgggacccagaatcagtaagtacacattattagacaaattacccccagaactttttttggctgccaagataatcagatgccaattacccaccagacattcttatcctgtagttgattccaaggtcattcatcccttgggtaccattacttcctttctttaaaaaaaaatactttagaaaaatagtttttatttaaaccagccttaggcaacaaatatgaatttcaacctgcaaaaacatgtataaaagcactgtctgattcgccatcagaaattctttcctaagatgatagtaaacgtacaagttccagaaaaaaaatacaatgaaatttaagcattaacaattcaaaaatgctttgaagtcatatttaagaataaagttcaataacaccaaaagcacaaatgacaacagaaaaatagataggtcttcatcataaataaaaacttttgtgcttcaaaggacaccaccaagaaagtaaaaccacagcctacacaatgtgaaataaatatttgcaaatcatgtatctcataagggaactgtatataaaatctagaatgtgttctagtacctagaactcctacaacttaataataaaaaggcaaattaccaaagttaaaaatgggcaaaagatctaaataaacatgtctccaaataagatatgcaaatggctaataagcacatgaaaagattctcaacagcattagccaccagggaaatgcaaaccaaaatcataatgagataccacttaacacccattagaatggctttaagcaaaaaagacagataataaattttaatgaagatgtggagaaaatggaactctcatactttgcaggtgggaatatgaaacagtgcagccactttggagaacagtctggcatttcctaaaaatgttcaacataaagttaccacatgaccaaaaatgctatttctagttatatacccaagaaaataaaaacatattttcacatgaaaacctgtcaatattcctactagccaaaggcggaaacaatccagatattcatcagttgataaatggatagacaaaatgtggtatatctatacaatgcagtattatttggccataaaaaggagtaacgtacaaatacatgctacagtgtggataaaccttaaacacattatgttaaatgaaatatgccatttgcaaaaataccacatattccctgattccattaaagtaaaatatccaggataggcaaaactatagaaacaaagtagattagtggttgcttaggtaagaggaggtttgtgggagaggtggagagcaaatggggagtgactactatactaaagagtataggagtctttttagggggtgataaaaattttaaaacttcatggaggcggtggttgcacaactctgaatataccaaaaccatcaaattgtatactttaaatgagtgaattgtatggtatgtgaattatatatcaataatcctttcattaaaaagtacaaataatacagtttgagaaacttcataaatattacaagaaaatatttgatgacatatctttacattcaaaacaagctaaagtataatcaatgcatatcttacttgtgattcacttctgtgagtttttccatatgtcacgtacatgtgatttcttcatgatcatcatcacacgaattggcaaaaactagaaaccaatcgcttggaaattaaaggagagaaagttgtcaggttgccagaagtggaaaaacaggttgaatacagatttgatgttaccagctaaagttatgtgcattacttcactaattggaagaaaacaattttccatttggaaaagaaggtgatacgattcagtgtgtcaccaatatcgtctagaaatttaacacataatggctattgggcaacggatagcctattcaaaagtcaaaacccagttaatatacagccctccttttcccaccactatgctgagtagagtgaattcatcactgtgtgtgtgtgtgtgtgtgtgtgtgtgtgtatgtgtatgtgtgttgagaaaagggaaacttactatgataccagtagtaacaactttaagattttataaaacgagtgttatcaagcaatgagaataaacaaattacaattacacacaaaaatatggaaaaatctcacaatcataatattaagcaaaagaagccagatttcatgcatgatttcattaatataaactcaaaaggaggccaagcttacctatgctatcagaagtcaggatagtgggtatccttaggaaagctgggagtggagagggcatctgggaacttctggggcactaagaacattctgtttcttgtttcagatggggtctagattttcattttgtgccgtgtctgcaaattatgtagttcatcctgcccttactctactcctttaacacattgactgtgtctggaatttaagaaaacagtgtttatagcagctgtgcaaagtgtcatgaatcacacattcagggcaggaaaaaatagtcaatgtagtcaagccagtctgaagaaagcaagaattcttatgcacgtaatgagaagaagtgtcccagtgctagtatcattcatctttgaatcacagcttcctcaccatttagagaggggagaaaaaggaaaataagatgaactgaccatcttttaacctgaataccaagcagatataaaacattatcatctatgcttttctctttccaccaaggtgaggcataatacatttgatcaccaattactaattaatcacgattctttatccattaattttcaaaaaaaaaatcctggcagaatctttcaatcttgtgaatattttttattttacatgtgcctaccttgccgccagcactagattgttgactgttaggcctcttaaataccatacattccttcaagcaattgacgtccatgtccaataccctatagcctctatggtggagggagaaaaatgttgctttgaatttttgttgttgttttgattttgttacatttttgtgtgtttttgttttgttttgttttgctttgctatttgctttaaattaaaatctccaaagttggctagatgcggtggctcaagcctgtaatcccagcactttgtgggggccaaggcaggtggattgcttgagtccgggagtttgagactagcctgggcaacatggtgaaacccctgtgtctacaaacaatacaattccaggtgtggtggcatgtgcctctggtcccagctactcaggaggctgaggtaagaggatcatttaagccagggcagtcgaggctgcagtgagccaagatcataccagcacacttcaacctgggcaaaagagcaagatcctgtccctaaaaataccctccaaagttaacagtttgccttttcttcaaaaggcttaaaaagaggagcataaggtcttgcgatacttttacttttactgtaagactgtacagtcctcagcaattttggccttaaaatgatccagagcaacaaatgagaggcacaagggctttgaagtaagctcaatgtttattggaaaccccaactctactactaaatatttttttatctgccttggagctacaacaaaaccattctctgagcctcaggttttaatgggtaaaatggaaattttattacctgttattgtgaagattactgtgaaggctaaatgaaatgtggaaaaaccctgagaaagtttcttggaatataagtcaaggaggggaagagaatagcagtttatacaaagaaatggcttatattgtaaatcactaaagtataattttcaaaaagtaaaatcttgacttttatgtaaatataaaatgaacacattgaagattttattcaacttaattaataaacagcaatatataaatactggatcaaacaaaaatgtgagaaacagaaaaatataggtagatgtagatatatttataaagagagacaggaatgcagaaatgaactttctaatagatgcaaaactaaatattgttctctagggaaattattataatgatgcttggggttatcttatccaaggaagattttattcaacttaataaacagcaatatataaatactggatcaaatgaaaatgtgagaaacagaaaaatatagatagatgtagatatatttataaagagagacaggaatgcagaaatgaactttctaatagatgcaaaactaaatattgttctctgggaaattattctaatgatatttagggttatctcatccaactggcataaatcaaattgtatctctactggtgaaaaatcatttgcattgctttccacatgaataattaactttgctatcagttttctacacattaacttctatccctacagaattgtaaaacagtcaacagaaagtcaataaagaggtgcagattcctgtagtatctgatgatcctctgaaagttcactatactatgttttgccctctactaaaagggcacttggtaacttatcttgcccatttccaaggccggagcatttttttttcttacaaaattacctactgtgtaacgcatatgtgtacatgtagctgaatggagacaatttgaaatgcaaagctcacacacatccatttcaagtgctgtaatgggacaatacatttccttgcttttttgtgtgtatgcgttttgtaaggaaggatggatatgtaggtaggtgaataattgttgtagaatattattcttttctttctttctttttttttttttttgagacagagtctcgctctgtcacccaggctggagtgcagtggtgcaatctcacctcactgcgagctccgcctctcgggttcacaccactctcctgcctcagcctccccagtagctgggactacaggcgcccgccaccacgccggggtaattttttgtatttttagtagagatggggtttcaccatgttagccaggatggtccgatctcctgacctcgtgatccacccacctcagcctcccaaagtgctgggattacaggcgtgagccaccacgcccgaccagaatattattctactataccaactgatgatcagtctctccttcactcctcatcctagctgttgagctgctttattctcattgtaccaggaggggacggttgcagagtaaaatgcagatgcatttaaaaaaaaaaaaaaaaaaaaaaagctcttttggagttttgaagtctttggggtaacacagagacacccatgagtgacagcagcaggtttctggagaaagggatgttcttgagggaccaaaagagagatgcttccagattgagaggagagtagtcggtaaagaagtaatgagcggaggcacaggtgggtggcagggaggggcttgctctgcttcccacgcagttcccctgaaaggaggaaggtccctggagagagaaaactgctgcagagggagtctaggtggatggagccatagacggacttgcagggatccctgatccctggttcctagcctgacagggaaggaacagagctgaattattcccttgccttcccacatgatgcagggaaagcagagagaaagccactagagcttcagggtgcaggaggaagaggaaatgtgagatgatgcttaggagcatatgtcagtgaccaaagacattgtcgtgcttcaaacctgctcttcccagagcaacctgatttcataaatgctccttaggactgggccaatggactgaaattatctcaaccacctggtggaaagtgaaaagcagggggggtcctcaatattaaaattaagttctaagaaaaagttatattttttcaacagctatgttgtgagctgatttatagatgctatctctatgattgctgtgcttggagagattcagccccccagaaggcccagtgctttgccacctcttaggatccacactactgtacctcttttactgtcaatatcagaagggctcagccacaagcccttggaagcttagaaaatttgtccttcctaagaccccagaattgtctcaggatttaactcttgaggcaggccaccctggaacgggttcactctgcatgtgtctataaccaggtggacttttataaccagatcatgtccaacaggggtataaaaagatccaatcgcatttaggagtccagataaatttcctagtaaatcaggagacaggctacataaatgtctcccacagagtctatgcatttaagatgtctagaaatagatgttaagcgacaggactaaaagcactggatgaatatttttcaagagcctctaattcttacctaccttgctgcctcactatggctgctactatattcctatgaatataagaaaagttaccctaggtcaaggtataaaccatctgtggctaagacagctgatggtcatcaaaatccacattctcctcttccttctggacacagggtagactacatttcccagccttccttgaagtaagtgtagtcacataaccgagttacagccagtgggactgggggaaagcagtgtgtgctgcttccaggcccagcctataaccctcccataggcactgctccatgctctttgtcctttgccaagaaaagagtggtgatcacagtagctttggttgccatgatctgaggacagcagcactttaggtcacatcggtgaccaaagacatcagactttgagtgatatggtccctgccaacgtccaggcctctttctggtttcttgggtataagtgtgaagactgtgagagagattgagggccacagtcctggctgttgacccttcttacgggagactttctatcagccaaacttgtagtatgtggtcattgaaactttcttcttaggtccaagaatgtcattatattgtcagtaacaatattcctggacaaagaggaagagagatgctaaagttttgtatcatatgatttctgaagttctctcctataatccttatgttagccctcagaggtcgtgatcctcttttataatagaaataaacaagattcagatgaatgtgcctgatcttagcagagccaattatccatgacacccagcctccatgagtgactgacatattactgaaatgaaatttgagggtgtttcatttgatggagaacatccaggtcaccatctttttataggccagctgttttttccatcttccttacttgcagagaaattaaaactgcatgatacatttcctgtagtgaagctaagcctgaagcctcaggacctgtgtgcacaggggcatggaagagaatgtgttttagccatgccataaataccttatcatacatgacttttacagaaatgtgacaagagcaacaaaaagaaagaaagaggcaactttgaaatctcaatgctcttggattcattcttatcacatacttgtgtcctggcacccccagaaagaccttggggcagaacaggcagactctctgaggctgggtcactatgcaacgtttctaacactcaaaagccaccgcttcgcctttttccttttccacaccattgcccctcaggtcagtaggtaaatgccctctgcggtaggtaatatactaacaacataaaccagcagtccacagaccctgactactcacccatgcctgtcactggaagaagggggtgggagcacaaggtaaatacaattttccctctttagccacaaaggatttaattcccccaagccctcttgataggaaaattcacaattatacgacttggaacactaaggttcaaacaagtttagatttgacaaaattcactgaattgtaccttaggatttgtgcatttcctcatatgtaaattctaccttaaaaacaacaataaaaaaaaaaacacctgactacactctcaccaggctggttacaattttaaaaagactgactataccaagtgtcagtgaggatgtggatcaactgggatgttcattagtggttggtgcataaacttgtgcaaacacttggaaagccatggatccatgtattagtccgttctcacactgctacaaagatattgcctgagactgggtaatttataaacaaaagagggttattgaatcacagctccacatggcaagagaggcttcagagaactttcaatcatggcagaaggtgaaggggaagcaagacgcatcttacatggtggcaggaaagagagagagagcaggggatactgccacttttaaaaccatcagatctcatgagaactccctcactatctggagaacagcatagggaaactgcccccatgatccaatctcctcccaccaagtccctctctcgacacatggggactacaatttgagacaagatttgggtggggtcacagagccaaaccatatcaatcagtatcttccaaagttgaacagatacacacgttatgttccaatgattccacttctaggtatgtacccaacagaaatgtacgtatatggctaccaaaggctatactagaacattcacagtagcaattgctttaatagctaaaaactagaaacaacccaaatgtccacaatagaatgattaaataaattacagtatgctcctaaaatggaatactatgtaacactgagaatgaacaagttattgctaagcactacaaagtggaaaactctctcaaacgtaataattgagtgcaagaagccagacacaaaagaatatgaactgaatgactcttttatataaaataatgaggcagaactgatccatggtgatagaacttaaaatagtggtttctttgtgtgattaaggagtgaagagtagggcagggcctgaagagggcttctggatacgagaaatgtcctatttcttcagctgggtacagttcccatgtgtgctcactttatgaaaattcactgagctgtgcaattagtctgtgtatccttgtctatgtaaattagcctgcaatttttaaaactgctaaaaaaagatttcagatgctcaacttgaaaattaacctatgagagtctttaaaaatatacattttctacatttcttggaagaaaacaattagaagaaaactcttagagcagtaaactaaataatgagatcctctgactagctgcaaaattttaattagtagtaataagtactgcagtaggcagagtaatgatcctccaaagatgtccacaccctatccctgcatcctgtgaacatgttaccttacatagcaaaagagactttgcaagatattggtcaaataatgaaaaatttctgttagaggggaggaacaacttcaagacatctattatacaacatgatgagtataattcataacaatatattgtatacttgaaaattgctaaaagggtgaattttaagtgttttcaccacacaaaaaataattatggagaggtaatgcatatgttaattagtgtgatttggccattccacaatgtatacacgtatcaaaacccatcatgctgcacaacattaatgtatacaatttttatttgtcaacttaaattaattacttttaaaagggactttatagatgtaattgaagttattccaagattatcctggatttcaggatggtcacaatctatcatatgatttcttaaaatcagagaacatttcctggccgtagtcccatatatatacagagatgtatgatggaagaaaggtcacaggcattcagcattgctgactttgaagatgggggaagggggcattaataaaggaatgtggacacctctagtatctggaaaagccaaggaaagaggttctcccctacagcctccaaagagaaatcagcactgctgacaccttgattttagcctagtgagacccacgtcagactcctgatctgcagaactctaatatgatacatttgtgttgtttcagccactaagtctgtgataatttcttacagtagcaatagaaaatgaataagaatgctaagcatttaatttccgtttatcatcccatgctagctagaaacataaaagtgttctttgcatcaaagcattaactaaagaataagctagttttaatttttctgcagataaagcacattctaaaagactttctagagcctgtttctcattcaaaatatgtggtgtttttatgatattataactcaaagttaatgacttttcttccccaactaaattgtagacaccctcttcttatataaattccacaaatcttccctatgggagacacaagagtacacattttctgtctgtctctagaatttatgaggttttacccaaatgaatgtattaagtttttctacatgatatctctctcaatcttcagaacagtctaatattgatcattcaaaagatccaatttgatctctgatcaataagatctgatgggctaatatggacttggttgccctaatttgggttcccacaaacagactctgagacaaggatttaggtgcaagtagtttattggggggtattttcaggaagcatggataagtaaaaccaggaagggaggaaaacttaataatgggtgtttttataagagggttactactgagggcaacagagccacagtcccattgggatctctccagaggctgtgaacatgcctcagaattgtcccataaagaagaaaataacatggggtgtttatgcaccaacttctgtcccttgttggctgagagttgctctcaaggatgtgaatttcccagcacacctggcccacactgcagaagcagagaataccccatggtcagagaacctgcttgggcatagaaacacagaaaacagctgacaccgtgtatcagggacctccaagctaagtcaaaaggatatgaatgagggactgactgtgtcagtatgatctatttcagggcaaagatatgtgatgttaaatatgtgctatgcatggattttccaatcacaacagtgtgcaaaacccaaaagtgtgaaaactaaaattaacttgatcttgattaagagttataatttccacctgatatcagataaattgacatgatcactttctgggttttctcagataattttcatgacttattggtcagttcaaatttaatattaactcacatgcggctggccttcttaggtcatcacgtttacaacctattcatggggaaatctatggaaatgaatggtctctacgatgagaatttttccagattgaactcttcgggaaatttaagtacttccacgtagacttattagtagatattgacatgtcattagtcatttgtaaaaaaatttaatatattgcaaatttttaaacatcaaaaagcaaataaagcatttttattcattatttggccaatccaatgaaatctcccaaataataacagattctgttatttcttttcttggtggttgatggttctcaagtcaacagctgaaggagaggtgtcatggtgtaaggaaaacggcactcacttagacccagacattcttgagttcatgacccacttctaccacatattattctgtggctttggaaaagtcacttaacctgttgaaaatttagttttgcatgagcatcactctccattacatgggtaaaacttgagtcactgagaatgaacagatttctgtacactgtacaattctgacagttcattctgctcatatcctcccatttttgccaactctctatccccaagttgttccaagagcgttttcacaacacattgccaagcctctgtccttccctttcttgcctatcctcattctgttatctccctttttggctgcttcattaagagaggagctgagaatctggcatctgggcaaaaccattactttggagaacaccacaaggccattgctaattttatcatctttgcctttaatgtactagtgggaagatttatttctacctttaatagtaagatatcctaagtagaaggcatgtgggtactgctgagtcttagttctgtgaaggtggagactgtgtatgttttattccttgtgagaaccaaggactcagcaaatacagagtacttattcaaacattttctgaggttactagttgatccaaaatgtatttagttgttcagagatgccaaatcttgctcaatatttagtctgtgttttagtattgctccaaaccttaaacctaaacctaccactgacttcaacagaactcttcgcttattttaactggagatggtatgaagcaatgagtcaccactgactatacataccagcagtgcctgatgccaaatggttggtgtgttaatataattttgtacacacaacaatgcacacattccaatacggtaagtaaaatagaaaagtttcaagagtgagagcacgtagtagatatttctcagaaatctatgtgtgattacctaaccttagcaattgcaattaggggaaggaaacggagaaagcagaattcagctgtgttttaagatttattttatatataccttttgtcccttgtaaaaagaaaatttgaaaaagaagaagaaaaagaagaggagggtgggggaggaaagggaaaaggacaaatgtgaaaagaggaaagagatggagaagaagaaaagaagaaagaaaagagacatctaatgttaaaaaagttttatttcaaaatctttattaaaaaaatgctttgcactgagcaatagagctcagggaaaataacgccctctcttcaacttgtctttctaagtaacgtgaggcagttgggccaacaatagtgctcccctctacctcttcatctctccatttcctaaatcttagaagaaaataaacctacaagagtttagcccccaaatctcagtgaaacagccatggaagggagagaccagtgaaaatctacttctactttgatgataaaggttgagagaaatgcgataaaatttttgaacttgagacacaaactgggctgaacacacttggtattaactccgtctttcaccttggcctcaggccttatcttattcctccagcattccttgggatggtaaaggcaggtaccctcatatgcaagtcatagttaggagaagcgttagcatgtccacctccaaaagctacattaatctggagtagaactgaaccctgtccaagggagctgagttacaggacatgaggctctggaaacaggggccatttctttctttttgtttgtgtgtgtgtgtttgattgtttgtttttgtctactgccccaataaattggtttcttttcttagagtctgatgctaaagaagtctcgactcaggaaaaccacaagggtggacttgggaagactcaacaggttgtaatgactctccagcaaatcatgtcaccatgccatttgatgatggtaggaagaaacaaagccttgaagattcatgcattgagagaataagagttagtgagtaaaccagatgtgtttcaggactgggaccctgcagtcatcaaccacctcacacctgcgtcagtaacaaacccaagctacagcatgatttttgttctacctcagcagatattttatagatggaaaaactgaggcataaagtgggtaaatacctcccccaaggtcacgagataaagataacgcagtcatcaaatattctgtctcctcaacatctgtcttactggaattcttgatggattggtacccccttattatagtactgattttaacataggttggttttgaatactgggtttttaaaaatcttttcaaatcatttgtaaattatggaaatgtatacatcacatgaaacttaccattttaatcatttttaagtgcacagtttagtttaagtacattcacattgttgtgcactgatccatcactatacctttttcatctgctccagctcaaactctgtacccattaaacaataacttccctttgcctcatccctccaggccctggcaaccacctctgaatgctattttatagcaaaaagaaatattaacttttgagcttggtttacaaccaaaaaccacaattacatgcaggagagagggggtgggaaaaagaggttaactcagaactcagttacttagaagactctgtgagtgtgctgtgtgtgtgtgtctttaaaagactctccacctcccagcccgcctcctcacactttgccactgggttgttcagtccccaggttccctcagtccccagaaggagccagcatggacaatctcctttacagtttcggaagcaggtttgttgccatggagttcacattttgacgggagttgagaagtataaaggtaaccatttgttttagtttcaacgatctgacaaaaagataggctgttgctcttcttctggaaaagcctgattggtaagattcctttaagggctcagccccaaagagctttatcccatcccctcgcagactgaaaactaaagcctgcagagacctctgaaggaaaacctgtcccgggctctgtcacttcacacccatggctaaccctggaggtggtgctgtttgcaacgggaaacttcacaatcacaagaaacagagcaatggctcacaaagcagaaactgcacaaagaatggaatagtgaaggaagcccaggtaagaggcactctcccctactcttctctgaattacctgaacgtttcaatatttctctgtgaagatatttgaggctgtcctaacttagagttcatcttatgaagggtttttacatgttttgactgttgactctgttaatagaaagtgcttggctaccaaaaagtttaggtgtggattaaggagaaaatgtcttctgtatgcaaaagaggatacacacagactcacacagcttcaggctccctaaaatacaaatgtacctactagacttttgtctcaagcattttgcggggagggaagaattaagaaagttccaactctttgcatatatttttgtccaagagacctgctacaaccgtcatgcttcagaagaaaaagaggaagtgaaagtacattttgctgacattatgtggtggagatggcattcttcccaggtccatgagaaatgcatcactgtttgaaaggcgagttattattggtgtgtagtggagcattgttttagctcactacttgatttgaggccacagtatttctttgaaatgtgacgtcacagacattcttttccaaaacacttcagaaagcagggctgattgtgacacactgctctcagaaaacagaacagcatctttaaaacaaacttgtattttccaacttgacactttttttttttttcactcttattgcaccgggatgtttgcagagtgtcctaggcaggaggaactcgaggaaagttgtcagcttgttttaagagagagcctgggtctgtgaggtccttatgtaaggcagttccccactccccacaggacatcccgtgtcactctgctctgagcagcagaagtgagctcatctgcctgaggagcaagcccaagtagtcaaacaggtagcctcctgtttggaaagagaagtggcacagggagccccatgcaatcttccatcatttgatcatccagagagcaagtatccacccacaggaaaggcagattgttctaagatcacaggacaggtgggtctggctggggccagtcctcctctcagtgaattacattcgtgtgtgcaattggaagaggctaaaggagctctagagcctgagttgtgtgtaaacaggctgtggtccccaaaagcattcccctcttaacaaaaggcactgtccaacgctgggaggtgtctatcagaaacctcagaactggcctgtcccacctgaggatctgaaacctggagcaatgtgaagagaaggtgctcaactcctgtcagttgtatgaaggaaattgcagtaatatccaccacttatgcatcactaaatatcaattcaggccactactcaagacgatccttgcctctggaatgcctgtaactcacaagctattcatctacttacccttgtgattattctgaccctgagggatctcatctgggaagagattccttcttaacttttctcccttttatttattttatcttggttttataatcacattcgaggtatgagattagaaacttagacagttataaccactcctaagtaaggataaaacccaggattctaaaggttcattatgaagtgcagctgcaagactgtaaatatccttggacactgaggcttccctaagaacggtcgaaaacatcagggctgctgttgccttcctgaagggccatccagagcctcttgtctcagacatatttaggtgtcactaagctacaattggctttcattgagagcctcaattatggcttaaaaaatatttttcagaaaaacaaacgaacaaaaaaaacccggctgagatcatagtgtaatagggcaaacgagggcttattgtcccctccatgatgggaacgaagttgtctttactctcaagttcctttgccaccagttttgatccttgggaccctttaacaaactaggcctagaccaaaagccttgcctgtggatagaagcagtctgcaaaggcttacagaatcctaggctgctggtctcccaaacacgttctgcctggcctaacgtcttctgccgcagcatctaagatcctaccagcccctccaatgatcctcccaccctttctcttcccacttatttgcaaccacacagcaacacagttatctcttttatacattaggggaccctacaagattctgttgacaaagggttccctggcataacaaacatatgaaaattactattaggcggtgctcatgagtcctccttccccctggtccagcgtaggctgccatccctgctccagcctgcagcaggcttgctgccccagtctcaaggctggcaaggaccagagcctttccattcttagaaaccttctagagttcctttctggagcttttatggagcctgactatttttcctgttttttttttttctttaaacctcatatgtcctgagaatgcacaaaaactggttttcatcactgactaagtccatttatttgtttattcccaacatggcctcctaccttttacttgtaacaggacactatcatactagaggatttgttctccctcttcatgagcatatccacactacagacagatgggtgcttaaagtcttaatctataaacttgatatttcttataatttttattgaattaaaattcttcctaatgaataggaatttcctattccttacttaattctatataattactttgcaactattatccacataattgctttttaattcccagcaattatttttgacctgaccataaacttttatttggaaaaccaaaacctaggaaggtagaccttgtgtctccattgcattttcccagaagtagtttcttaagaggatagagtctgcattttcttctcttaaacgaaacctgcaggatgaaaaaaaaattgtaaagttttcctaatcatccctttcctggaaaacaaaaatgtttggggattagagttactctaattcaaggtttattgagttcttgacctgaatgttgtaatattaccaggtataggttatgagccctaacaggtggttgcttttttttcaccaatacttattaagcatctgttattcttaggacctataaagataaataagaagtttacaatttatctgttaggagaaagcttatatcaacattaaaataatcacatcaaagttaaatgctagtgcaaggacaagagctgccataaagcagacataacttgagtacaaatgagtggtatagatactagtactagaagttggagaagagcaaaaataataataaatatcaatattctgctatgtatcaggaagggctaagcacttcaggcaggcatctcctgtaccttcaaaacagccccatgaagtggtagtatactgtccattatacagatggggaaagataaatcactaaggaacttctgaagaatcacaatcagcatggccaggatttgagcccaaatccaagttgctccaaagccagttcctttttcagtatgttctaggaaatcacaagttggggtggtcagtgacagcttctcagagcagagaagactcaaattgaaccttgagacattataattgcagaaaaaatagggagcttattcctgaggggcaaatgaggaaaagacaggaaaggaactccagagatgaatgtaggagttgctagtaaagggcataagaaaggtcatgaagcattccaggaagctgtgaggcacaataggtcatgtgacttttgagagacttttctcaattcagtgagccttcatcgcagacagtgagaagcagtgctgtggctgaggtggtgctcagcagatgctggaagaagagaaaggattaagccacattattatggaaatcatttccagttttagaaccatttaagctgaacttctattctccccacctttctatatcctcttgaagtctgcaatatcctggtagagctactcttctgctgtagtataaacttcttctagagaataagagcaatgactgattgatagtttaattgcaaacagtggtagctgcctgacagccgtggtaagtacctgtgtctgtggggctcacctaggctaccccctgattgaaatagaggtcaatattctctccaattactaggagaattcataaactaaaagttttggaaatccctttcaactgctctgagtcttcatcttagtcttgtctttggtgttcattttctaatgcctttgtttcttggctcctatttccttaaaacaatccccaatgtggcaaggcttctccatgaactccttaaggaatccgcagtttttcatgagctcatcatttataaagcattcttgtgtgtcaggtgctgcagtcattaagatgaaaatattctccctccatttataaatagctcacagtataaatgagaaagacaagcaattatagtatttaatggtaagtactatagcaaatgttacagttatctattcctatgtaacagccagtccaaaacccaatggcttgaaacaataactattggattgttcatgattcaggcaggggctgctagggattgcctttctctgctccacgtggtgtttgctgcagatcaacttgcctgagcatccaagatcaccccattcacatgtcccagaccttggtaccagctgttgtccaaagcaccttgtgtctacttcaccaggacaccctctgcatgtggtctcattattctgcagagtagcccaggcttttttacaggatgactggcttctaagagagtaaaaatagaaactacaagacctcttttatgtcctagggacatttctgctacattctgtagacaaagccagtcatagtccagctgagatgcaaggcgaggagaaacagatgctgcttttttcatgacagaggctgcaaagtcacattgaaaaaggttgtaagggattggagagattattgtgaccatctttggaaatagtccaccacaatagaaatatatggaccttgcatgggaacacagaagaatgtgtatctgacctaggctgggaagacaacttgcttcagagaggcatttgacccaagtcttgaaagcagagtagccagttgtacaggcatagaaaggcattccagcagagggaaaggctgttagaaggatataaaatatcagagcattatgcctttggccaatgaaagatgagttcatggtaggaggttcaggatgcttaatggaaagaaccaggtgggaaaagattgtaaaatgcctttgtcttagtttacattccccaagaaacagacccagagataaagatttgagtgcaagaaatttattagggaggtgaacccaggaagcacagaggaaaaatagtgaagtgaggcacagaagggaaggaagccgatacgctcatgagcaagttaccattgttggcaactgggactgagacttgtcggggacatctgggagatggcgtacaacacatctcaaagctgtctaaatttaaaaaaaaaaaaaaaagataaatgtcaaccaattccggtccataatcagttgagggatgctcagcacttgtagactttccacacatgggctgagcacactcctatggcagagaaagccctcaagctgagctacaggtgcttgcagtaagaaatcaccagaatggaagaaggtctggatgcgccaagagtgtcttttataaccatttatatgtgcaagtgatggaggtttgagaagggaattagcatgatcagatacggtttctcccaaactgtgtaagctttatttatggtgactcttagagcatggtttatgaattagccctgatctaatgggctaatcatcatacaagacaggattatgctgttaagcaacataaacagagcttacccactgtgtttggcaaaggagaaaagggatatatcaagggtaaatattattgccataatttgttccctttgcactcaagcaagatgaaaaaccagaaaccatgaacagcttagcaaattttaactatataaaaaaactaaaacttaatatggcaagaagcatcataaagggtaatgcataaaaagcaattggaaagcatgactgaagtaaaaactcctttacaatagcaccagaaacatgaaggacctggaaatagatttaaataaaatgaaaatcaattggaagggagtatgaaaatgctactgagggacatgaaaggaaactgaaaataagtggaaaggcatacaacacatgtagaggaagactcaggatgaaaaatgcattaattctgcctaagttaacctatcagtttctgtgtaagtccagtaaataaatcaacatatttttgagccagacaaatgacattgaagtttatgtgtaaaattaataaggaagaataattggaaagactatgataaataataataatgagggtgactagcactaccaactagtaaatcatgttgctcaccaaaagaattagaatggttttctattagtacatgaacagatagataaatattataggtaattgttaatctattaaagtataagaaaatatcaattttaaaataatatttacatgggaaaagtctttataactatgatataatacccaggagccataaaacaggaggtcaacaatctgactacataaaaatcaaatatttatttctgcatggcaaaaacaaaacaagaataacaccgtgaaataaccaaaaggcaaattacagaccaggaaaatgtttaaaatttatatcataaaatgcaattttctgattatataaataacttttagaaatgaatacaaaaagaggccaaacaccagaaagaaaagaatggacaaaagctatgatgagggaaatacaatttgaaatacaaaaggtaaggaaaggaagagaaagaagggaagagaagtcagaaaagggaaggaaaggaatatgctagaatcagtttccatgagaaaagaaagaaaagtccattttctcagtttgtgtgcattaagtgcaaagtcaagttgaaacttagtttgaataatctagttattttgatcagtttaataatgataatagtaaagctaataaatcaattgttgatgggtgctacatgccaggtcctactatgtaatttgcctcattgaattcttatagcagtaatgcaaagtggatattattagccacattcatacagatgaggaaactgatgctctgaaaacataaataacttaccccaaggtcacacaactagaacaaaactgggacataaactctaggctatctaccttatcctaacttcttacttcaacaactgtcgaagaccccatgatattatctactttctatgataataggcttagagacctttatttaacaactgaacataataccagttgtctaaggtatcaataatatacttttaaaaagaaaggtgcttatgctttcactgtgactaaagatattgaaagacatcaagctccaatagctaatgcatgttggcctatagttaaatctttgggaggtaatcaagaacataataattataataatctttaacatgtcttgagatcttcaaagtgccaggcattcccagtgctttatgttcatcatctcacagcattcctatgaggtattatttttggacccattttataggtgaggaaacagaaagctttagtaactcaaccaaggtcaccaacttataagtatcaaaaccaggtatggaaaccaagtttgttcaatcctagaacctaagttcttatcctttagtccacgcttcccctgtaaacacaagataatgttaggcatgggattcatacccacttccagagagaaggggccagcagacacagccttaaagggcagagtcagtgtgagttaaaagaatggtgagttgttttgttttcctgatttttcattcttaataaaaattttagcttatcacaaatgacaccaaactgtcatatatctgtgctttcaataggcaatgttattcactcagagacataccacattagtgaacctgtcacctccatgcctcactttgaacaactctaagctaaagaaaattgacctcatgtgactctgagtcatgtggactcacacttagccccagtcagagcttgagagatagtctggctttcaggagcttttttcaagagtacatggcctccctgaatagaaacttcacttagtacaatattttctggcaatactgatatcttagacatgatgcaatagatcaagcttgtcgacatgtggcctgcaggctgcatttggcccaggacatctttggatgcagaccaacatagattcataaactttcttaaaacattatgagatcttttttgtgattttttttagcttatcagctatcattagtgttagtgtattttatgtgtggctcaagacaattcttcttccaatgtggccctggaaagccaaaagattggacactcctgcagcagatgaaagatagttacaaattctttggagtatttcccattgagaggtagaatctaattctaatccacttgaacctgggctagacctaatgacttacttgaccaaaaacgtgatggaagggacaatctgggactcctgagagtcagttacaagaagactcgcagcttgaacccagtccttgtagagtgcccattcttggaatccagccaccatgctttaaggaagcccaagcagcccaagaagttcaaggagagaaaccaagtatccttgctctgtttctagctgagatgcagtaccaacttctaaactgtgtgagtgatgtatcttggaagtgaatcctccagccccagggtgtgtttgctccaattgatacttcatggatcatagaccagctgtccctgttgggctctgcccatattaaaaattcttgagcaaataaataattgctgttttaagtttgctggtggcttattaagcagcaataaaaactgaatacatggatattatatttccttaaaatgactagaaaagtcattgtgcaatctcagtaccattttcaatgctttcatttatatttacatttacagagtttgctttgaccatgaatttgctattaatcattggcaaagacacattttcataagttataaatttctgttttgtttggcataaggactgtatgcttaagcccttaaccagagatgagtgtccggctgtaaaagccaaacacaatgaacctaaaccaatgcaaaagcacacccatttgaaaattgccaaatctgaagtgtaattattaacccttaggaggtctgtaatttattacattgtctatgaagaaatagttgactcaataaagtgtgtgtgctcaggtgtttcattggcttaattaacatattttaagtatttttaatatctgccaattacaaattaattttatctattggttaaagcttcctggaaaaattttctctcactgttgaggtaaattgatattaacctaattaattgcaagaagtcaactatgctgattttgaaatatatttaatgtttttagtaaatatggctacctttgtctcagttggcctgtactaatgtagttttactggaattctaaggtattacaatctataaatttacgacagaaagatctattgccaccatattagaaatattttccggtgatttggagttcaaattaactattttgggggaaaaacactacaagcatagctcagagaaatactcaaaattatcctccacaatctacttcatctatctatcacagtgccatctgaatcctgctctcctgaagagttttgacatattgaagatcatctgagcccagcggagtttcagattgcaaatgcctagaggagctagcagggccttgtgtaggacagtaggagatggtaagaatgggtttaaatgaacaaggcctggtgtttccaagagacagaacaggctccatcttgatagtttttccaacttttaaaagaagctggaaatccaaattgaggaaaggaggtctcatgatttctaaatgttggcatctaatttttaaaaattcaaatcctgtggatttaaagaaaacattgctaacaaacaccaatttgtaacctctaaactataggcaaacagagtgtaggaaataggctaaaaagtcctaagtacagtgctattttctcatttgtttaggaaaaatggctcagagaatttggctcgcctcgatttaatttactttatatttcaaaaagtgatagatgagtcttccaccttcactttcctgagttgatatattaacaattaccctagactctgcaggtttgaggaactcttatgaccagctacatacactagatttccttgactaacccaaatctaaaatattaagtcccaaagtgttcatcaaagtgttagagacctggtgatatttattgaccaaaccacaactctcagatttcatagtcagtggtgcacaaaccttcgttagatgatgtattcatgaagtctagtcaccaagattgttctctaaatctggtctaactggaccttcaaaagtttcccaagcaaaaggctatgtgcaagtcttaattattctcttacctatgggttatacacagctcttatttgtctgtcttgtggttgtgagtcttttggagttcaaggattcctttgagaagctgttatatactttctaatgaaaattaatatgtccataactgcaaaattttttacatagagaatgtgtgtattccctgacttcctcagatccccagattagaaactttggctctgaaattttgtataaaactaggctatttctgcacttacaatccaactagaaaaaaacagcaaatcaactgttccagagaagacagggtaaaggattcacaaattgatccaccaaaaaagagaatatcacacataacacaaagtgattgaggcagcaagccccatgtgtgttagacatttatttaaaaattggattagagggtgggtgtggtggctcatgcctatagttctaaagcttttggaggacaaggaaggagggtcagttgagactaggagtttgaaaccagtctgggaaacatggcaagaccccatttcttaaaaaaaaaaaagaaaaaaaagaaaattaattagctggacgtggtggcatgcatctgtagccttagctatcccaggaggttgaagtgggaggaccacttgagcccagtaattcaaggttaccgtgagctgtgattgctccactgcactccagcctaggcaacagagtgagaccctttctctatattttgtcatttatattagaagtttgcattttattacataatatattaatatttattttgctgtaaaactatttttatatactcttttaaaactttgaagaaaactgaactccgcagaaagatgtttatgtggtagcttttcgcactcccgcaccccttaggatgtcccaggaaaatgtgaactccttaaggaggaatgatagtagaaagaccactagctttgatatcagatgtaactgggtttgaatctcggttctgccacttactaattgggccatattaggaaggtaactttatgtctctgatccattctttatgaggctatggtaaagaataaatgagatagcacatgtaagactcccaataactatcaggcatacagtagatagtcaataaatgattattatctattaacattagcctgcagtcacctctttcttctctactgctatcataagactaatcagtacgatgcccagcatatagtagatgttcaataaatgacagccataaacccttgaaatccttcatcccataatgacttctcaatcttcattttacttgacctgtctgcagcattagtgaaaaataatcactctctctttctcaaagcacattcttctcttgacttccagggtattacactcttgattttcctctttatcactagcttttcctatgcattttctattcttggttcctcctcctctctttgacctttaaacaatggaatgacccaaggcttagtctatgcccctctattcttttctaactgcatatctctcatgaagatctgatcttgtttcatcatgttaaatacagtaagacattcttcttcaaagggttaacttgtttaagtttgcttgcccttttttccctgctttcaaggccagactcccttactctctgtgttcccttgccctgggaaacaaccttcctctcagtcttatctatagagcctacattccacatctgctactcactctgtaaatcacctccccccaccacaacagcccccccaccaatcccccgccaccatccccacctccaccaaaactgttttcttgtcagtgtaactgcatccctgcacgtctcaagttagccaactgggttcagcttagattgtgtggtccaactctaaccaatggagactgcacacagcagtaggagcccagtgtgttagggataaatctgctgctttcctttgtttgatgtgctctcgtggtgaccaaactaacgagcagcacccttctgcagaagtaaactttgccttgctgagaaatcaactatcagagtgtcatttcctttgcgacttcaagctttatttctaacacatcatgatagatagattagatggatgatagatagatatagataagtagatagatgtataaaataggcatttccaactgactacttgatgtatagagatatgtaaatgtatatgcataaataggcatttctgactgcctacttgatctttccacttggataatcaaaagtcgtctcaaacttaatatgtaccaaactgtgctcctcatgtttcctcctcccgctctctaaaactatttcccttacagtcttccccatctcaataaatggcaactctatccttcttgtggctcaagccataaaccctggtgccattcgtgacttttctccttcattctattctgcattctatctctcagtaaaacatgagctgaccttcacagcacatctagaatctgaccacttctcacctttccctcagcaactccctggtcttagccccctttatctctcacctaaagtattacagagctccaactcttttatctgtgttccactgtctattgctgcataacaatgcagcccaacacacagtggcataaaaaaatgattttattatgcttgtggattctgctggtcaggaattcagaaaaggaacagtgaggacagctctcccctgctccatggtgtctagggtctcagctaggatgactcaactggctgggctggagaagctgggccaggagggtccactttccagactgcctcctcagtgtcacacctggcacctgggctgggaaggccaaagggtgagacaagccaggactgtgaactggatcgatgcagccataaacaagcccaccaggttcaaggggaggagattagcctgtctcttaatgggaagagtagcaaagaattcatgagcatgttttaaaaaccaccatgtcctgtttccaccctcccctcccctctgccacaatccactagactttctctatacagcagccagtgctgctgaaataaaatccagagatgtcattcttctgcccaaatccttcccatggctcccatttcactcacagcaaaaaacaaaatacttaccacgaccataaggccccacagcctggccagatcatctgtgactcatctcctgctactttccctgagctcactctaaccccagatgctgcacagcctcttcactgttcctggagccagccacccatggcgtcctcccacctgcaacatttgcatttgcactcctcatcccccgtcctggaacaccctttacccagacatccacagggctcacccttctcctacttgaagtcttcactcacatagcaccttctctgtgggactcaggctcacatgctttctaaaattgcaacccaccccccaacttcctggcccctttcctgcttaattgttctctttagcatttaaaaacatctgcacatgtgcacacacacacacacacacacagagtcacacatatacctacacacataaacacacatgcatgcacacattaatttatttcctatctgttgcctgtctccacatttagactgtgaggtccacctgggcaggaatttctatctttttcactgctgaatctctagtacctagaccagagcctatatgtaataggagctgaaaaatatttatggaatgaataaagactatctgtttttacaaatctgttctttgcaagaactcccatttaacatacctagatctctaaaagactaagaaagctctgctcatatgatccacagacttctttgtaaacttcaaagtatataacctcttattaattaattcacaggtttcttaagctttgttggacagcatggctactatttactaccacctttttaaaaatcacaaagtcattagattactttggtgaccaggtaacaacatgcttctctattgctatccagatatgatatactccaagcttggaggtagggagcatgctttaagcagtggaactttttgaagagaatgaaaatagaaataaaatattattaattcatcttgatcattcctgctgcatcttagcaggagatgaaatatgcctggattagagggaaaatgactaatctcccaaggtgtgtagggctgtcatcagcttctaataaaatactgcattctcagagtcgagtgtccaagaaagtaaatgcgatctgttttcctatgaatgacccatatatgagacgacttttaaaacttttatttaacaaacttttacattgcactacatgctaagaactttacaaaaaccaactccgttgaccctcacaacaaccacgtgaggttgatactgttactatcgtcattttttagatgactaaacttagtcatgcaaaagttaactaaatttgcctgagataaaacatatagttagcagtgcaatctagtcacaggacctgtctttttatcattagatgaaatgccctttcctccaccattttattgtaaacatttgcaaatttatagaaaaccttatataattctaaataaatattcatatatctactacctagattctagttagcattttgctatacgtttactacttgtctacctatctatctatctatccatccatatgttttatgcatctcaaacgaagttgtagaataaatacacttcacttctaaacccttcagcatgcataccattaacttcaatatttttctatagttttttttcttttgaggtaaaatttacatacaatggaatgcacaaatctgaagtatatcattcaatgagttttgacctgcattggcttttgattccttttttggagaaagtttcctaatgtagttttgactgtggaaagatgaactaaaactgctcacttaaaattaaagagtttaatctctggagaagagaactggctaatgtgtaaatcatcatctaatgacgtaaaggaagagctcaccagaaggctgtcttctagagaaattcccctgctacacactcataattccacagcgatcagcagctattttcctctttgtctttagtgtaatctctccagcaggaaaggaacttagttcagtaatctttacaattccactccatcccctgtcttcttgaacacatgaagaaagcaaaggccaggaattataatagtttgatgatccttaaaataatgtctgctattgcaaatttctttagtatcaatttcaaaattgatattgtgaacttgtatttgtctcatgttacaagcaaaggcactcctttcctatggcccaaaataagagccacatgtagaaaacttccttttctgcgtgtcacagatcaccacgtcagagaaaataattatacaggtaataactgctaccatacatgaggacactactatatgttcacccttttataaatattgtcaatccttacaatagactttcaaatttcacatataatgaaccaagatttgaagaaatcagatgatcacccacacagctggcaggtagtggaagcaggatcttctgactcctaatatcacgtaacctcaccctacagccttatcaccctagtaacctgaatcattatgtaaaacttggaagcaggatttgactttcacacttcctgagcttgaatcccagcttcatggtggtgtgaccttgcataagcagtttaatctctctgtgcctcagttttctcacctggtaaatgaggtgaatagtagtgcctaccctattggatggtggtgagaaattaataagataatgcatgcaaagccttagaacagtgcaggcaccagaggaaattctctacaaatgtgcactattactaatattgacccttgcaagaatctgccttatgtccctctctgccccttctttggtgaaacagtgccagaatatgacaagaggttgcatattggttgacctgcagaaacctttttttaaaacttctattttaggttcaggggtacatgcacaggcctgttatataggtaaacttgtgtcacagcagtttgttgtacttattatttcatcatccaggtactaagtcaagcacccattagttatttttccagatcttctccctcctcccaccctccaccctccattaggtcccagtgtgtgttgttcctctatacctgtccatgtgttctaggcatttagctcccacttctgagaacatatggtatttggttttctcttcctgcattagtttgctaaggatgatggcccccacctccatccctgctcctgcaaaggacatactctcgttcttttttatggcttcatagtgttccatggtgtatgtgtaacacattttctttatccagtttgtcactgataaggatttaggttgattccatgtctttgctgttgtgaatagtgctaaaatgaacatatatgtgcatgtttctttatggtagaacaatttatatccctttgggcaggtacctggtaatgggattgctgcgttgagtggtagttctgtttttagctctttgaggaatcattgcactgtcatccacaatggttgaactaatttacactcccaccaacagtgtgtaagtgttcccttttttttgcaaccttgccagcatctgttatttctcaactttttagtaatacccgtactgactggtgtgagatggtatgtcattgtggttttgatttgcatttctctaatcagtgatattgaggttttttcatatgctttttggccacgtgtatgtcttcttttgagaagtgtctgttcgtgtcctcggcctgcagaatcctttaacacacagtgacagaaatatacttgaataaagcatcaatacgtcttcaaataaaaacaaactgaatagtagagtataataatattaagaaattaaggttaggtgcgaacaaagtgcagtgttgaaactcggatgaccatagcagaccctgctggtgccatgtccacttctgctcttggcggttaccatttccatgtgcacagcctcctctccaatggccaattcccatgccctttttctgagaactttctgaaaaactgttacatgtcagacactgttctaggaactggagcccgttcttccctagtgggcatcaggccaaaagcaccggagattcaacaccccctagaagcagtgctcaacctttgactgatgggagctggatgataaataccccagcagcctcatccttcgggaaagataattcttaggtgtgttctacactgtcttctgcagaccccggtggaagcgagctccagctgcccacactggtaactgccttaaaagcacaccgttcattggtttccttcccttttctggctggctcatctctcctcctctaacagtgcttcctgggataaccttccaaataaacaggttgtatttgaatcttttatacaggtttgcttctggagaacccaaaattaagacagtgatttttataaaacacggccaatttttacccctttaaccttcagcatcaactacaatgatccttacgtctgtacgtccctttcacatccaggatctcattgtaccctcagtcatccaggaagtgatccagtgctgtgaagcagataaacaaatgctactgacctgttttaggatgagaaaatggggctcagaaaagtgagatcaaaaccacatagataatagagacagagctggataatattataatgccagacacagacacgccgactctacattcaggaatgccttcaagggctgggtgcagcagacacctgtcaggcccttattcagtgcatacaactccgtccacttcccctcataagaacaggaaggaaggaaaaaaatcagagcctctgttcttcagtaatctatttcagcacgcacacacacacacacacacacacacacacacacacacacgcaaaagtgtcaatttagttattaaactgcccagaggaacagctttgggaatcagtcttactaaaattttaaaaatccatgcgattctaaaagcctcaaagaataatactgatttctacctaagacttttatagctaggcagcaaagtgattttacatggcatatcagatagcaaaattttctacaaatctctcttaaacaattatttacctttgtcatcacatctctatgttttatatgatgtatatttcttagaataccttctttggagtctttgaccagcctcagctctattcttaaaatcttgacattacgaatggttaattctagacccagcaagggcacacgagtcaattcacgccttggttcctttgttgagtttgcccaaggcagaggcattgatgacacggttggaactcttgggttcttgcaacataacatgcttttcaaccacctactttgataattagtcctaaggaaacttggctccagaacttcttacatattagaataataatggcagaacggatatcagatctcagagaaccatgttatatgattttttttaagatcttagtaatacatttctcaacaggaccagaagtttctgttcacaaagtgtgaaagctcagggggctgatgtctggtgattcagtccagtggaatcagacttcagaatttcatagacctgtgagttttttttaagtgaattatattgtaccaaagtttttattctgccatgattcaaaagatctaataaccccttatccactatcactatcgtccataaattcaccctaaaagatattatggacatgatgtctgattaagagacagtccctaggaagatgtccatatatgtatatacttgcaagcataatatacttatatgttacacatatatatcatttttaaattttaccatacatcagtgaaaattttcatacatgtctttaaagtgttatagactagtatttaggaactattagactaaccaacaagtagatacaagataagaatggactattcttctctgctggttttgcattttgtcaaaaccaggatcaaagccaacaacagtaactagcttccacttcctttaaggctgaattatttatgctttgttctctcacaagagtgtgatattcagacctggaacacagccttgggacactcgtatcctttactgctgatgaagctatttggctattattttaaaataggaagcaacagagactcaaacaggtatagtcacttgcccaagatctcaaaacggccaatccagggcaagacatgcctgtgccctttgcctgtaacactgtactcccttacacatcacaaaaccagaaacaaactccgaaggagcccttgacagtaacactatttgtccacccatgcaaatgatttggggcacctggagatatcccacagctgaagtacatctcgggttagtttgttagcttatgacaggaggggctggccttttctttaagaatccatcctttcccattggttcattcttagcaagacaactgaatcacgtccctacagactgagtatagtactcagaaataaaagtgctccacatggtgacctgcgaaaatgattcaatggttgaattaaacaagtcacagacatcagttcgcttttgttaagtataatgtcaatcttaatattccagtcagataactcatgcttttcacctattcacttctttcggctcaggagctatgatggctaaaacatgcctggttatacaaagctggttgattcaggagtattgctagtcaagattagccttgctctgggagaggttattttttcctatattatatggcacttgaaaacaattaatcagataattataattatgatcatggatattattagactttttggaagcaaattaataaattgttgtggtgccattttcttagcgaattacttgtttggagacaatatacttatttttcatggaagcaaaaggctttcatgaaaagtaaaataacatgtgctgctttcagtgcaaacaaaagatctcagccagggaatccgtatatttcaactaagtgtaatctgtaaggatacattctgtcttcaaaggaaaccaaaagatgaaccaagttatatggggtaataggctatgtgcagccacacaccaattcctaataaacacacagagaagggaacagctgctgaatccttggcaagtttctctctttctaggtcagagagccttctgcttctacatgtggctgaatagcagtccctgtttggtctagcatcaggggacaggaaattttgggtgggacctaggtatagtagctcagcaaggaggtgcaagaagaaattggtttattttgattcaaaaagaaaaactgtggtttgtaatccaagttcagtccacggagctcagccaaatgactgtcagaaccacattgcatgtgcctccaggagccccaccctcataataactcatccatgagtcactggctgcccctactgtgaagaaatgccacagggcacaccacactgtgatgtcaaaacacacctctgttgttggttcattcctgtggaatttaggagactagccttttgaattttggtcagagacttgaaatttcagaaccaactaagtaagctggactcatcaaattttcttccaccacgaatataaaagagattttaaaatgactaaccacaaatcactgtgaaccactgaatacgggggctccctggagatctatttaccacatcatcttccaatggccctttcaagaaccatgcctgatcaggctaccatttgtttaaactcatcagtagcttcccgtgttaagatcaaagctgcaatccttaacacaatttgccagccctgcatcacctcctcagcctattcattcttacatttgttccttcattcattaaatatttactggacccctgttacatgtcagacactgttctaggaactggggtactactagcaatggacaaagtggatggaggtcctcctcctggaactgacattcagccatgcctgcccctccctatccatgagctaccccaaccgcacaccctccttaccattcctcaagcacttccttctgcctggaagactttttattcctggtaaactcctactgattattcagattttatttaaaacttcattttctttggggaggaccttctctttttctgaactaggtcagatcccatcctataaccactccacagcactcttaattacttataattttcctttttctaaatattgttcatccgtatttccttccagaccaagggttggcagcctttgatagatagtaaatattttcagctctgtaagctattcagtctctgttacaactactcaactctgccactgcaccggaaatgcagccataggcaatacatgaacaaatggatacagctgggtttcaataaaactttattacaaaattaggctgcgggccataatttgccaacttctggacaatagaacttcctatgatgatggaaatgctctataaatgtcctgtccagtaaggtagccaccaactacatgagaatattgagcacttgaaatgtggctagtgcaatcgaagatctcaatctctaaacttaatttaaactattgaaatttaaatgtaactaacgacatatggctagcaacaattgtattgaacagcatagatctaaaccgtgagagcagggcctctgtccctcttgctcacaccatttcacctgaacctagcacactagctggcacagagttggtgctcaatatataattttggaatgaatgaatgaacagatgtataaacatgaaataaattatcaaactccttgtctccttttcaccactgctatggcacttggctagacttcttgctctctagtcttaaaaggttctatttttgttctattttgcacatggtttctctccactagcccatgacctccatgaggctgggtgctgtaagacactacccaagtgatctttcccatgcccaacacaggtacacgcacgtggaagtcaagctttgcacagtgtttgcagctactagtattcacctgagatggaaaaagactaagtcccatgggtactctatttctgaaatatgttccagtttgtcatgtcttaaagatctaacttttatgtttctttcgggctttaaccctggtatgtggatttgagaggatcaacttagtcctgtcttttcccgcttcataaccttaggcaagttgcttaatgtccttgtgtctctcttattacgtgaagatgattctaattccattgcagtgatccaccacctacttctttggaatagcatgtaagtaaataagagcatgtccataaaagcttttgagcacctgagagataaacattgttctcacatggcattttataattggtcaagaacgtggtagttattctcagagatataaaaccaatagtacattgttttctctgatttatcagaataactcaataaaagctctgtgttcctcaagtgagccagccagttataaacaagatcagaataatgcagccattgcaggatggtgaaggatagccacttagctctaaagctgaagtaagtccaattgacttagaaccttcaccctagctgtcattccaagtggggtccagtttacaaatatttctgccctgcatttcttctgcagttctgataggggaacatcccaatgaaagcacacctttctttcacaactacctgaaagacaaagtctggcttaccctgctatcaaaggcgttccattattcaattccagtggactctatacagcttatcaccaagtatataccattcaaggcccagccagaggcccatgcaaggccatgttccctcatttccacccaccaatgggtgcccacactggtcctcctatcctggaaggtctttaccacctctcttaactttcccagtcttggctctccctcattcactcatttcttcagcagatattcactaaacactctgctggggactcaatttagacccctccatgcaatcctgccttttgtgggaatccttcatccttcactcaccactctggctgcaccttgctgaagccttggccctcctcagatcctcactgttttgttggctgacttctcaggtggtgaatgggaaactcaagatgatgggaaattaaattaacctcttatgaactgacctgattaatcaatagaaagaaagggctggagtagctaatataggaaaacttgacccctcaaagtttccatatttgtaacttatcactctctttgacttctggggtcagtgaagcctaacacttacaaagacatgctcaatcaatcaagaactaagacttgggtcttctacagagttaattttatacttaaacttcctcagaccttgatttgaattttgatcagaccaggtgtttcctaatacagacatttccttgaggaggtaatttggttctcagacttccaccaaacccttctaagcaaaggttagaaaggaaagaatttaacaatattctgatagtatgtgtgtattaaggtaatacttggtgtcataatacataagccaccaaatcccaatggcataacccaacagaaatttatttctattcataataaatctaattggtagtgataagaagtagggttgggaggcggtaaggactctgttcctcacatttcttcagaaaaccaggctaacaaaggttctggaatctttaatgtgtagcttccaaggtcatcttggccatcaacattcagatggcaacagtgaagagaggcttttatgagctagtcatagaagtaacacacttttcttctattcacttcacgttgctcagaactcagtcttatggccacatttgtcttcaagggatgtcagaaatgtagcctagctgtgaggaggagaggtaaatgggtttggtgaatagccagtctttgtcacaccagacaatagtgttgaaatatttaaaagataataagagataatggaagctattatttttgcaagtgatcttttattttctgttctttcattaatgaacagaaaatatttattaagtgacttgcctattaaaaaatctttaaaatattattgttatacaaggtggtgagtgtaatgatggtgttatgcagtgagaacatccagcctggtgctttttaggaagtgaagccagagctgtgtcttaaggcaggcagagtgtctgtatgtgaggtggaggtgagggagaggtgaaaggggagaacagttgggaagaaacagaagaaactgaagaaattacgaaaagtgacgatatgaagaaaggctaggaaggaataaaaagcagggtgtgaagtgagagccatttgatactgcttaggcaataaatggaaggtggaacatcagagatcaggcagattattgtcttctgtaccaaataactaagctctatactgaaaaccaacaattcccaaagagtttttctcatgacataggtagatgtcatgaaagataaaagaaaaaaaaaatgtatttgatatatgtactgagtttcccaagttaaatggtttttcacttcagtattgctcacagcacttaacaagttgattcaatcagcaaatatttatcccacatcatgtgtgaggccatgtgtagacactggggacacagtgaggaataagaaagatattgccactgactgctacatcctagcttttgacatgaaaatccccagcacagggcaaaggtacatacttttttttcccaaactctttttgttgatggccatctctagggagcagattagagttagacctcctgatggtgtcccataattcttgtggtctttctttattattcttaattatcttttctcctctaactggaaaatttattttccagaaattatatttgcagagagtggctgaaaacatctacatctggggaaagatgccaacacacagacataggaagtacagagaccttcagtaaaatttaacccaacgagaaactttaccatcacacataaaattaaactaccccaaatcaagaactaaatagtgtatcatttgcgtcagttctacatgtaaaaacatactttttgttattcaccaaaaaaaaaatgctgttatagatgatggttggatgttagagctagagaaagagttgtctagcacctgcagagttgaggagtcaaaatcaaataaagagaccacccaggaggtaattgcagtggtccaggagaaaggtgatgggtatctatcctgatgttctcaattctatcttggggatctttctctctattcattgctactgtgcctatccttccactgctcagcagtcaaacctttgatcaattcttccctcattcatgaaacctcccctgccttttccagccagtgttagcttcatgttcctcccagttctcacagctgttccctgaacatctctctatgtaccatttgtcagctttcagtctctctgtggacatttcctgtcttctggcagaacagttggtaacatggacactcaatgagacttggtttagtgttgaactggtaagaaaataatgacaataacaaaatatttcaaatagaattggtgctggagttttgatgctgtcgaaaaagtaaattttactataagttgtcctacatattggtagatttcagcggcctgaacaacttgagttgactgagcaactagatttcttctactccagctatcctacttggttctgctaaataggagctttcttgaagcttggattttatcatgtgaaacattgttttattacagagtctgctaataaactgccaagaggtcaatgattaattacaccaggtgccttccgaaacaaaaataaaattatcaggaaggtgctgtgtccaaataaacgtatcaaccaataaactgctaactggtcaatgattaattgcaccttgtgccttccaaaacaaaaatacaattatcaggaaggtgctgtgtgcaaatagatttatcatacatgactatacacatgtagaatcaagtgacacactctaaaagaagcaactctcctatttgtaaacaaatgatctgggctgagacttgagttttataaagcatttctaaacatttgtatttataaaatacatgtcataaagctattgttaaaatactcatttcttaaaatctccagacaatttagagaaattaattcaccctaattaagtaaggcaaattaagttgtattatatgcccttccaagtaaggtagaactgtactctcatcattcttgcatcattccattttcatgatctttggtgctatatcacttgcataacttcagtcatatctaattgacattccaaagtattttgaagagaaataaatggcagctttgaaatcaatcagacattcaaatgttttagactaaaagcagagttttctactgaggaaagaactgaattttaccaaacattaggtgatgatttaaaaaaaaatacatgctaaaagtgcataatctatacagttgacccttgaataacacaactttgaactgttaggatctatttatacactgattttttttcaatagaagttacactgggtgcacctctccttccttcctttccacctcatccacctctttcatctctgccacccctgagatagcaagaccaacctcttctcttcctcctcctcctcctcctcagcctacttagtgtgaagtcagtgaggattaagaactttatgatgatccacttccacttaatgaaaagaaaatacatgtcctctcccttatgattttcttaataacatatttttctctagcttactttataaggatatagtatataatataaataacatacaaaatatgtgataatctgctattcatcagtaaggcttcccatcaacagtaggctattagcagttaagtttttggaaagtttaaagttacacatagatttttgactgcacagaaggccagcacccttaacccccatgttgttcaagggtcaatggtactaccaatcaggttagggcattcattaaccaatcagagttgatttgggacataaacaactgagatgagtatatcagtgtgtactagatagccatcagtcctgccccctccactgagacccatcagttagtcccatatttagtttacaatttttgttactctgatgggaactgactgatggatcctttccactgcaagtaatggaagcctcaaacgtgggtagattgaaatgaggcttttgttattctctcatagcaagtctagtattgggtagtccttggctttgttgattcagtaactcaacaatgtaatcgaaaaccagtattttccatctcttcattctaccatcttttgtgcattaaaaaatgccttccccttatgccacaggaaggttgctgtaattccagaaatcccaatcagacacaacaatgtctggagaaaaacagagacattttccattttttaccaactatttttattcttacataaagcctttctcagaagtcacccaatggacgttccctcacttcccattggccaagactggtcttcatgcccatgtctaaaccagtcactggcaagactactatggctatcttggactaattatgctttaccccctgaggctagagaaaggtcaccttcaactgaacatcaaggttcttcttgcaataaataaagaatatgaccataaggtagacaatcaacagtctgcatcgcataacaaaccccaccagatgatctgtttgaaaggagaatttgtgatcttgtaaagccacacttgcactcaagtctcagtgctatgctcatgaaactcaaattgagccccatttttatgtttcatttcttctgtagtaatgacagttggaccacagggcttgttcagagtctgagggagaagtgctcctatataactatgaatgaaatgtgaatctcttacaatctttgaaggctcatctcctacaacagaacattccttcaggttatcaagaataaaatgagtcttagagatgcggaaatattttagatgggtggattaatcaggataaataatgctaactgctgcaacagaaaagccataagtctcactagcttaaccatgagttttattcgtcaaacatgtaaagttcattgaagatcaggcaccactttcaccctgtagcttttccttctggatctggtggtttgcaagattcaacggtagaggaagagagagatggatgagacataccagctcgtgactgcctcagcccagaagtgacacatgacatttccactcagagtccatcagccagaatgagtcacatggcctaccacaattgcaagaaaggctggaaaatacagagaaaatcatgaatatatatatatataatatatcttcattattagctgtattctgtctgccatatggtgtgtaaaaatcattttcaccattgatatattattggtctgtagttttctttatctgtgatgtctttgtataattttgatcaccaaggtaatataaggctcatataatgcattcagaagtgttttttccttctgaatattttagaagactttgtaaagaataggcattaattctttaaatgtttggcagaattcaccagcaaagacatctgggattgggctttttctgtgggaagtttcaaattattaattcaatgccttcatttttacgggtctattcagattttccacttcttattgagttggttttttgtattatgtgtctttcttagagtgtccatttcatcttaattctaatatgttgacatataattattcatcgcattcccttataatcagtgttatttctgtaagaacagcagcaatgtccctctttcttgattttagtaattttgctggtttctctttttgattgatccatccaagcaaagctttgttaattttgttgatttatttgaagagccaccttatttctgttatctatttcattaatttccactctaatttttgtgattgttttctgtttgctttagctttagtttgttttactttttccatggtcttaagataaggtgataagttattgatttagatctttctttttaaaatagaggcattagagctataaatgtcctgttaagcactgctttagctatatctaataagtttaggtatacatgtcttcatttttatttatctcaaagtgtcttctaatttcacttgatgtcttctttgactcatttactatttaggaaaatgttgtttaatttccacatatttgtaaattttcccattttttctgttattgatttctaattccattgccgttggaaagaacatactttgcataatttcaagctttttacatttattgaggcttattttatgactagctgcagaatgttccatatgcgctttagaaaaatgtgtattttgctgttttggggagacgtgttccatagatatctcttaagtctagttggtttatactattgttcaagtcttctattttcttgttggtcttctgcctacttattttattcattattgaaagcaacatattaaagactctaatattattatgaaattttctactctatttctatcagtttttactttgcactttttgggattttgatggtagatgcatacatgtttattattgttacatcttcctaatgaattaatcattttattattataaagtatccatctctccagcaacagttttgttttaaaatctattttgtctgatactactatagcaatttcagctttcttacgggtgctgttttcatgatatatctttttccattcttttacttttaacttgtttgcatctctgaatcaaaagtgtatctactctagacattttagagttagatttgattttgttttcatccagtttgacaatctgtacttgattgggtcatttcatccattcacatcttctgttataactgagatagtttcatttatgtatttttgctttttgccttctgtatatctcatgtcctttttgtttatccattcctagtttagtgctttattctatattttaagtgaatattttctagtatgatattttcattattttaataatttttcactttttttgagttttcttagttgctctacggcttgccatacatatgttaatgtaccaaaatcaaccgcaaatttatacaaacttaaatccagtgatatatagaaatgttacttctatatagcctaccttcccttttatgctattactgttataatatgacatctatatatttataaaatcaacagtacaatcttataaatactatgttgtacaattttatgtcttttttaagaagctggaaaggaaaggatgccaaatatataggtgtatgcatgtacgtgtgtgtgtgtgtgtgtgtgtgtgtgtgtgtatgtatacatattgagaaagaaagagtttgttacatcaactttcttatttatcttcttatttaacatttctggttttattcattagttgctgtggactctaattgccatgttgtataatttccttaattcaatatagttttgctcacatccaatttctttgtgctgttattgcataatatatgtctatatatgtaagttcaacaatgaatttatacatattgttttatacaatttcttttaaaattatttaatagtagtaaagggaagggaagaaacgtgtatttatacttttttttttttgacggagtcttgctgtgtctccaggctggagtgcagtggcgcaatctcggctcactgcaacctccacctcctgggttcaagcaactcccctgcctcagcctcccaagtagctgggaccataggcgcaagccaccacacctggctaatatttttgtattttagtagagacagggtttcaccatgttggccaggatggtctcgatctcctaacctcgtgatccacctgccttggcctcccaaagtgttaggattacaggcatgagccactttaataatttcataatcacctttgcctgtgcccccttttttttttttggttggatttgaatcattgtctgaagtcacttgctttcagtctgaagacctccctttagtacttcttgaaaggtgggtctgctattaacagattctttcagtttttgtttatcctgaagtgtctttattttgccttcatttttgaaggctagttttgccaacataagattattggttgacttcttaaaatatttgtgcattttgaatatgtcatcccactgccttttggcttccatttttttctactccaaagaaagctgttcaccttattggggttcatttttatgtgatcaattgtttggctcttgctgcttttaagattttctctttgtctcttaacatttttactataatatgtctgataacagatctctttgcctttattcaaatggatatcattaagcttccataggtatgattaatgtttttcatcaaatttagggagttttcagccaatatttattgaaatgtttgttctgttcctttttctctcctctctttctaacactcatattgtgtatatgttggtgtactcaacggtatcccacatgtttcagaggccttgttcatttgtctttatttttttcctctggtttttttgtttgtttgtattttgtattgcacaaattccccttctctatcttaaagttttctaattttttggtcttccagtttaaatctgctattgagcccctctagtaagtttttgtttctgttattacacttttcgatttcagaattcccacttggttctttttattgtaatttctattctttataaatattttctatttgataagacattgccatcataccttcttttactcctttaacatggtttcctttagttctttatatatatttgtaatagccacgtggctgtatttactaagtccaacatcttggtccttctcataagcaatatctgttgttcttatgtagatcacatttttctgtttctttacatgactcatatttttggcttaaaactgaacattttaaataaattgtacaactctgaatactaatcactgccctcccccgcccccactagaggattgtctttgttgtgtttgcttatttttttagtgacttagatgagctattttcataaagtatatttacctcacagtgtaaaacctctaaggttgccacttagagagtgcagacttcagcatgtcattgaagtgacagtggttttaggaagcttctatatgactgtgccttcccaaatcattctgtaaagctatcttcctctgttggtatcactcccaactgtgagtctccactccactacttgctgccggattgctctattggttttgacagtgccctgcggcataaattgcttcacaatctaatccaattaaattcatgatccttggtatgtttagcctttgaggtttattctgatcttaagagggctcttcatagctatcaatttccctgattctctctggctgaactacctacatgaagattagcttgttgcttttaccgagttaccagtctcttctaaagtgcttgccaccagaatctccactgttttccagagcaccctttaatcttgaacttccctactctttgtgccaaataaaataagttatcttggggaatgctctggagctctctctcccactgggcaaagccaatgaatcactgcttcagagctagggaaaggatagtagctctaggtggggcaataccttctggttttcttggctttcctcttccaccatggaacctctatcctgctagtgtgctggagtaagggtaattggggccccagtattctcagcatgccatgtctgatatagagtctctaccctaccagtgggtgttcattagaggaagtaaaccctcaacctctcagccacacttgcacagaatttagcctctgcaaaacagaactgagagtgataagaaatgatggtagcttgcccctctcaaagaaataccataacccttgcctgaagcaggggacaggaagcctcatcttggccacctgctcaaagtagaatgtttctacttgctgaactgggagacaaagggagagaataggtcatggctcaatgccacagactctcagtgttcttttttgatatttagtgtatttccttcaataaatatttcttcatttgttatatgcccttaagacaatgtccaaatactttaaaaagttatatttttataatttttaccagttatgctttatttctactgtgaagatgatctctgaggctctttatgccaccagcagggaaatagtctaccttccatagatttttaaccaggctcctatgtttgaacaccatataatgtttaaagtaaatctcttattctataacactcacagtggttctgtttccctacgcaaaacctaactgctacaatgtaggcagagacttattcttaaacaccagtatccttggaagtttgtgttctccctcagagaaggatctatgccaatcttgatcatgatgtggaaaaccccaaatacgttccatttcagaaaggaacatggccctctcgttagctccagtgctctagatttcctttgccatttcatcctccctgagccaatcttatccccaaccttcctgcccttgtagatcaactaaggcctgaaagcctcctcttcctcctcattctcaccctgacttttcttttcaaggactaacctagcagtgtaatggaatgtgtcatgttgcatgggctgcctcactctgaaaacaaaagtctgtttgtgaatggatggtgaattggcagcattaagttggttttagatttgctcatccttttgtatcataccctaaaaagctagagcacaagaagtgactgcatcacacatttttcaaagtgctactgagatagtctgcgtccctgtggccaggacagtcacatgtgctcttcatcctgtctccctcaaggggtcgtgttccaggaattatactgtctcttacctttatctacaattatgcttaatctattaaatatttttctaagctcctatatacactcagtctttattgcaaaataagcaactcccctcactattagtaaccgaagtcaccaccttctctctgtcctcttccctaccactatacttctttaataagtcatctcagctccctgtcccattgccttcacattctctctctccttaagtccctgcagtctgataaaattgcagggataacaggttgataagattacttactcaagttttcttgtgagagtccccatatacaatggtcttgttgaacttctatatctcaacttagtgtcactcttcagtccctcacctcttcctccctctcccacttgctgtctccttagaggaccctcattctccctcttctccctaggtattgatacattatattcttttgtcttgtttcttttttttctttttttttttttgagatggagtcttgctctgtcacccagactggagtgcagtgatgcaatcttggctcacttcaacctctgcctcctgggttcaagcaattccccctgcctcagcctcctgagtagctgggattacaggtgcctgccaccacacctggctaatttttgtattttttagtagagacagagtttcaccatgttggccaggctggtcttgaactcctgacctcaggtgatccacccacctcggcctcccaaagtgctgggattacaggcatgagccacagcgcccagctgatacattatattcttgatcaatatatcctaggtcaatgtatatccttggtctcctgtctttcttcgtgagactctcagtcccttttgctagagtctggacaaatccagcaaggaagccatatatatccttggtcaatatatatgaccgagagaaaatattgtctttctcttttttctcaaatatgtctctaaaagcagcattatccattctaatagttttcatctatcatctctattcagaatatttaacaaaaatcgtaacatttaatgagtttttgtattgtagcaggtaacctgcatatactatctcacttaattttcaaaagtgacctttactagccccacttagcactggagacatttgaggcctcgaaaaattaagtgactttcacaaggtcacacaggcagcaaaggaaagtctgacccctgagcaaatcatcttcattgttatgctcgacaacccagcaacaccagactccagttcaacctcctcaagaatcactcctgatcacccagtgtgatgtggtcccttcatttgcatcatcctttgacattcacattttgctctacattatggtcatttgtgtccccaccacacacacacacacacacacacacacacacacacacacaccctactgcactatcaattctggggaaaacatactgtatttattgatttcatatctcctctaatgttagcctaggacagccagtaaaagagctacctattgaacagaagagtaattgtctgtaaagggctccctgcatattccagcacccagtttatttccagatatgacagaagcgcaggaagtaaacaaaccccaggatgtcacatcatcccaaacgactagatactgtaggcaatgtggctcagggtctgtttatttttaaggctgcgaaagaaaaggtagaacaagccaaagtgtattacaaataacaatgcttatctgcagtaataacaagtgcttaataaatgcaaacttattaagcaagattttatgcttcatttactttgataggatgaaattttatatttcaaaataactatccaacaacagattgaggaattcctcctgggaggtgtgactgacttcaattataagtaaaagaatatagtaagtgagtcactagctatctcttaaggagaccaatacatttccagatagcttttttctctgtgaagatatctcatttttcctctgccaaataaaattaattaagtgacattaaatttaaaatgtatctatttatatgagaggaaaatagatcctggtttgggctgatggacatttttgaaattttctcctttgtgttattacttgcttccagaacaagtcacaggggcaagtaaatagttacatataggcccagtctgtgcaaccaactgagggttttatttgcatctaggtagaccatctgtgatgtacagtgcagggttgcctcagagccaattcaagcagaaactgcctatggatttcaagagaaaagcaccacttgatttggttacaggtgaagctcagaaatgaagatggggccaggaaaggaagaagagaaaacctgctgattgccatgggttggacttgaatgtcctcacattttctgtctttatgtacacccacataacttagccattctctaagtcagccaaaggggttaatttgcaagcaggttaaattaaggttctgaggtcacccacactgggttccctttattcaccctttttcttctgtggtaccggaaaaagcactgtatccacaaattctgtcccaagcctactgctcttccctctttatgatttgtaccttatcgcattcaccttcaaccatgacttaaactgtggcccgtagtaattgactcagtcagggtcttccttttctcctacattcctcagtgctctgggaatttatgcaggcaatcaccacccccaaattagcatgttctgtacagactcatgtcttctctccaaaaagcagccctccttccaagtccttctttcttcttatcaacaatactatactgctccttgcagatagttttctttttcctcttccttgacttcatatctaatcagtagaagttccaacatgtcttccttcatgagactctgagtcccttttgctagagtctggacaaatccagcaaggaagccaattttgtgtccctgtgatgcagaaggatgtgggaggtgggtcttaactgggccaggaagtcacctggaattgtggagatcgatgtagtctaaagttcaagtgcagaacagagccaaggaaaggagccaaaggtttgtactaaaatagcatagcaagatcagccatccatcagacctacatgactggggtaaggacatagttagagggaggagtaggaatggggtctgtcttgttcatctttgaatccccagtgctgaacatgttgcttgctcagggaaggcatgcaacaaatgccctatatacaagccaagagtataacctttcatttaccttttactcaagactgcctattaaccaatgctctttcattttcattagcttatgccatgaagtagtgtttgggatgacacactagacaggaatatccacctatgttagtttggggtacctatagaagtaacctgaaataataaataaataaggaggcaagccattttaataatattttgtgatgttttgacttaagaattcaaattttagatatcactataaaaaggcttttaaaatttctttaagaataataatgtagagatttaaaatattcatctaccagactgatttgcttttcatctatttttgtggcttgggataaaacttccagtgactaaatcacagagattccaaaaattctgcttctcatataatgtagagggaatgaagataatatgctctggaaaactgtgttgattacaatgacaaagactaggagaatcgtcaaaacagtatttcaaatgtacacgatttaatatcataaatcattctaaatacatctaaatacatatatatgtataagctaaattagtaccttaaatattagtagagatctgacaatttttgtaaatcactaaaagttatgtattccaagtattcaaaacattttttgtgtgtcatctctttaagaaatgggaaatctgcagattgatttgtatttattgaatgaaataataaatgaatgtataaatatttattaaggactaaaacaattaaatattagcattagagatacgtatttactaatcaattgagcagatgttgtttgagctactctgtgcaaatcaattaaacagtcatcagaatggtttggtgttaaaagtccactttctactgaaaagtgaaataaaacagaaaattttttaaactttttactatgaaaaatttcagacatacagaagagtagaaaaaaataatatcatgaacacctatatactctccatccagattcaagagttaacgtttctcaaagttgctttatgtttttatgcaattttgacaaaccaccttaaagagaactacagctattataatgctttgccccttaatacttcagcatgcatcacaaagattaaaacattatgtgatgtaactaaaaatatctctatctttcctactacaattaataattctttaataagaatttaataagaataacaggctttaactgacaaagatcaaaaaagacaaagaagggcattacataattgtaaagggatcagtgcaacaagaagagctaactatcctaaatatatatgcacccaatacaggagcacccagattaaagcataaagcaagttctttgagacctacaaatacatatggtccacatttggatttccacagttgctcaaaatttgtctttcacctggtttttcacacaaaaattaaagaaagaaaacaatttgatgaaggaacacacactggatttacttgtttcccttaagtcctctcttccacacttcttttcttttatcagacttttttaaaagaccaggacagttgtcctatagaaagttctacattctggattatctgattgttttcacataaggtcgtttaccatgttcctttagtctagtatttcttgtaaaatggaagttaaacataagagcttgactaagttcaggttaaatatttcataggtttgctgtgtattgaatattacacataacaggagtgtagagtggctgcttattccaacatttgtgatataatttgatcacctggttaaagtaacgaccccaagtttgtgattaggaagtaagctgtggggtcatactttagcaacttgcaaacactctgttcctcattaactcttcacccaatggtttgagtttctgttgagaacttttgcttgaatcaattatgttactatggcttgtaaaataaagtttgcatttttgattaccctcttcaatggtcagtttctaatttatttacaatcttaaatatggcctttggaattcaaagggttgaaagttcacaattttaggtatcatagtatatctgtaacaggagaatgctaaccttggattttcttttgtgttttcagcaaaatgggaagccacatttttatgataagctcattgttgaatcgtttgaggaagcaccccttcatgttatggttttcacttacatgggatatggaattggaaccctgtttggctatctcagagactttttaagaaactggggaatagaaaaatgcaacgcagctgtggaaagaaaagaacaaaaagtacgtatgcgcacctccctggatctttgtcaatgcctactcctctctaaagtgttctcagaagtggtgatgcaggtgcagatcctagaaagcatgaggtgctcaggaactattcagggcaaatttcattcatctccacctcctaaaccccattacccatgggcttatggacctgtttttacaaacatctcatgggcaactactatttgccacataccaaactaaggcttttcccataccttgtaatatttaatttttgtaacaaccccatgatatagatattaaactataattttgaagataaaaacatcaaaatataaaagcaagtgctcctgggtgggactgtactttggtcttctagttgtaagttgggtattatttatgctctatcctgaaaaggaaagtgcatttgagtgaactgggacttttttatttcatctaaatctgatttctcacctttgacactattaatattttgaaccaatttttttgggcattgtaagaattttaacagcatctgaaaaatatagcattaaaccactaaagctaaggaccctgatgaagtcactgcaccctccactacctctactggaacaggcactggtatccactgctgagagacccatagacagttcacatcacaggactctgtggagacaatccccagtaccaacttggagccgggtagactcggtgggtggtgagacccagaagagagacaacaatcactgcagttcagctcacaggaagccacatccataggaaaagggggagagtaatacatcaagggaacaccccgagggacaaaagaatctgaacaacagtcttcagccctagactttcccaaatgagaaggaaccagaaaaccaaccttggtaatatgacaaaacaaggctcttcaacaccccccaaaatataatactagttcaccagcaatggatccaaaccaagaagaaatccctgatttacctgaaaaagaattcaggaggttattaagctaatcagggagaggccagagaaaggcaaagcccaatgcaagaaaatccaaaaaatgttacaagaagtgaagagagaaatattcaaggaaatagatggcttaaagtaaaaacaatcaaaaattcaagaaactttggacacacttttagaaatgcaaaatgctctggaaagtctcagcaatagaattgaactagtagaagaaaaaaattcagagcttaaagacaaggtcttcgaattaacccaattcaacaaagacaaagaaaaaataataagaaaatatgaacaaagcctccaagaagtctgggattatgttaaacaaccaaacctaagaataatcaatgttcctgaggaagaagagaattctaaaagcctggaaaacatatttgggggaataattgaggaaaacttccctggccttgctagagacctagacatccaaatacaagaagcacaaagatcacccaggaaattcatcaccaaaagatcttcacctaggtacactgtcatcaggttatccaaaggaaaccattttaagagctgtgagacagaagcaccaggtaacttacaaaggaaaaatctatcagattaacagcagatttctcagcagaaaccctacaagctaagacagaattggggccctatcttcagccccctcaaacaaaacaattatcagccaagaattttgtatacagcgaaactaagcatcatatttgaaggaaagatacagtcatcttcagacaaacaaatgccgagataattcacaccaagccaccactacaagaactgataaaaggagctctaaatattgaaacaaatcctggaaaacagagcttctttaaagcataaatcacgtgggacctattaaaaaacacacacacacaagttaaaaagcaaaaacaaaaaagaaaaaacccaaagtacacagacaacaatgagcatgacgaatgtaatgatacctcacatttcaatactaacattgaatgtaaatggcctaaatgatccacttaaaagatacagaaccacagaatgggtaagaactcaccaaccaactatctgctgccttcaggagactcacttaacacataaggactcacataaacttaaagtaaacgggtggaaagaggcatttcatgcaaatagacaccaaaagatagcaggggtagctattctaatatcagacaactgtaaagcaacagtggttaaaaggaacaaagagggacattatgtaatggtaaaaggccttgtccaacaggaaaatatcacaatcctaaacatatatgcacctaacactggagatcctaaatttataaaacgattactaacagacctaagaaatgagacagacagcaacacgataatagtgagggacttcagtactccactgacagcactagacaggtcatcaagagagaaagtcaacaaagaaacaatggatttaaactataccttggaacaaatggacttaacagatatatacagaacatttcatccaacaaccgcagaatacacattctattcaacagcacatggaactttctccaagatagaccatatgacaggccataaaatgagactcaataaatttaggaaaattgaaataatatcaagcactctctcaggccacagtggaataaaactggaaatcaactccaaaaggaaccttcaaaaccatgcaaatacatggaaattaaataacctgctcctgaatgagcactgggtcaaaaatgaaatcaacatggaaattaaaaagttctttgaagtgactgacaataatgacataacttatcaaaacctaaggcagtgctaagagaaagttcatagccctaaactcctacatcagaatgtctgaaagagcacaaatagacactgtaaggccacacctcaaggaactagagaaacttgaacaaaccaaacgcaaacccagcagaagaaaggaaataaccagtgtggctggcaagatggccgaacaggaacagctgtgctctgcagctcccagcaagatcaatgtagaaggcatttgatttctgcatttccaactgaggtacggggctcatctcactgggactggttagacggttggtgcagaccacagagggcaagccgaagcagggtgcggcactgcctcacctgggaagcgcaaggggttggggaactccctcccctagccaagggaagccctgagggactgtgccacgaggaacagtgcattctggtccagatactacacttttcccacagtcttcacaacccgcagaccaggagattccctcaggcgcctacaccaccaggaccctgggtttcaagcacaaaattgggcagctgtttaggcagacaccaagctggctgcaggagtttttttgttgttgtttggtttttttcacaccccagtggcacctggaacaccagtgagacagaaccattcactcccctggaaagggggttgaagccagggaaccaagtggtctaattcagtggatcccacccccacggagcccagcaagctaagatccactggcttgaaattcttgctgccagcacagcagtctgaagtcaacctgggacactcaagctcagtagcaggaggggcatccaccattactgaggcttgagtaggctgttttcccctcacagtgtaaacaaagcagtggggaagttcaaattaggtggagtacaccacagctcctcaaagccgctgtagccagactgccactctagattcctcctctctgggcctggcatctcgggaaagaaaggcagcagccccagtcaggggtttatagatggaactcccatctccctgggacagagcacctgggggaaggggcagctgcaggtgcagcttcagcagacttaaacgttcttgcctgctggctctgaagagagcagcatatctcccagcacagcactcgagctctgctaaaggacagactggctcctcaagtggatccctgacccccaggcctcctgactgggagacacctcccagcaggggttgacagacacctcatacaggagagctccggctggcatctggtgggtggccctctgggatgaagcttccagaggaaggaacaggcagaatatttcctgttctgcagcctccgctggtgatacccaggcaaacagggtctggagtgggcctccagcaaactccagcagacctgcagcagaggggcctgactgttagaaggaaaactaacaaaacagaaaggaatagcgtcaacatcaacaaaaaggacgtccacacaaaaaccccattcgaaggtcaccaacatagaagaccaaaggtcgataaatccatgaggatgaggaaaaaccagcacaaaaaaaggctgaaaaccagaatgcctcttctcctccaaaggatcacaactcctcgccagcaagggaacaaaactggacggagaatgagtttgacgaattgacagaagtaggtttcagaaggtgggaaataacaaactcctccaagctaaagaagcatgttctaacccaatgcaaggaagctaagaaccttgaaaaaggttagacgaattgctaactagaataaccagtttagagaagaacataaatgacctgatggagctgaaaaacacagcacaaaaacttcgtgaagcatacacaagtatcaatagccaaattgatcaagcggaagaaaggatatcagagattgaagatcaacttaatgaaataaagcgtgaaaacaagattagggaaagaagaataaaaaggaacgaacaaagcctccaagaaatatgggactatgtgaaaagaccaaacctacatttgattgatgtacctgaaagtgacagggagaatggaaccaagttggaaaacactcttcaggatattatccaggagaaaaatgtttaacctgatttggtgtttaatgaaaacttctgggtaaaagagaaagttaaattgggatctagacgctgatgaataaatagtaaggcaaagggtgaatcaagagagaaaaggaatctctaagaagagagaatatggtgcaagatggtccagaggttagagaaagcattgtacattcaaggaaccacggaattccaatgaccgagtgttgtgaatgagagtgggagtatgtgggcagaaagactgctgagaggcaagcaggggccagactataatgggttcttttagtaagccatggacatgtattataagaacaatgggaaagtattgaaggacttcaggcaaaggaatgcatatttgtagacagaaagataattctgtctaccctgtgagaaatggattgcagaaagacaacagagagatcaaaaaagacattaagaggttgatgcagatatacaggtttaaaaaaatctaggtgagatggttggcctgggaccaaggtagtgacaatagggttggtgacaagagaaaaggccaggagatgtttaagaggtagagttagagatggttgatttgacctaggaaaataggaagaaggacaaatcaaagaccacatccaggtttatgagaggtagcagaaggtggtgtcattcactgagatgggtaatagagaagcaagatccagttggagggagaaagtagtcaactcattttttgacaagttgagtttgaagaactggcagctaaacttaaagatctggacttctggaaaaagtctcagtgggatactgtaacatcttcagtttatcttcagcatgtcgacaggaatcaaagccagggaagtagacaagatcttccagggtaagttcatggagaaaaaagagaaaggatgaaaagaaagtgaagaacttcagaaaatttaatagatttcagagacagagtcccaattcaagacgaaaagcaaagtgacaagaaaaaaagttaacagtagtttagaaacgaggttatttgtgcttgaactaggaaagaggcaggtggaaggaaaaggaaattaattatagagaatatttaggaggtatcaataagtcttggtggctgagtgtacagaagataagatagaaggaggaaaataggggaatctcaagttctagtttgggcagatacatggatagcaacatcacatccattacaatgaaatggttctgttggcaaaatggtggccacagacagctttgaggacataaaggttcttgagttataaaggataaagaaacagttaaatcaagcaggagacaactcagcatgcttccagagacgcaggtttctctggtcctagtagagctgacaatgtaactgggaaaatgggatttgaaggggaattctccttgggcattctcacagtgatctccatggcccctaaccccaccagctgcactgttctagaggctcttatcaccagtcggcctgctccccaggtacaagtaactaatgcataataaatcagcacatttcagagcacagggacaaaggctgaaccaaatgtaaatttctcaggtgtggcatttcttggaaggcttaggcttcaaatctacaatctattttctaacctttcagtgtatttgctctattaaactagcaggtctaatcttcttgtttatctaaagcaatttcttacattttatcaggaaaaaaaatacacatgaagagttgtttcctagaaagcctactctgggatgggggcctgaatgcaggaaggttattggggtgtgctcctgggatcagcacctgtgaggcagagaaggaaatggcatggctcaggagggaggggagttggagaggaaagaggggatggagtgagttgtgatgatgcagacccagcaaaggcctcaacgaatcccacaaggagttccggagatgagagggcctttcaagagtcatctgagctgagggaagggggctagatctttttactcctgcattgatagaagctgccaccagggatcttggtggaggaagatcccttcagacccaggcaatcctcatggagctgtaagcctccaatgctcctagcaactaggggaatggatgcatcagttctgaacgatgggctatggacatcaaatggcagcctgcacttcaacacttgcccctgttgctacaagaactgctcgaaccgccccacaggagaaatgcattgcattaaataaattaatgatttacctttctttacaaaataaatggtttccatcctatctgatctctgtgaggtccagagcaatagtcaatagactcatgtagataaatgtgcctttcacatggcataccttttattatttgttcaatttgagtcccgttagagacttacagcatttcagagtgacaggttctaattaactgcagtcactatctttctgatgggacttgatctcccaaccctgtccatagactgacgctttaactttttttcttttttttttttttgagacggagtctcactctgtcacccaggcagactaatgcaatctcggctcactgcaaacctccaccacctgggctcaagtgatcctcccacctcagcttcccgagtggctgggaccacaggcatgtgccaccacgcctggctaattttttatatttttggtaaagacagggttttgccatgttgcctaggctggtctcaaactgctgacctcaagtgatccatccactttggcctcccaaagtgccaccgcacccagcccatccttaatcttttttttttttttttttaagagagagtctcactctgtcaaacaggatggagtgcagtggtgcaatcttggctcactgcaacctccacctcccaggttcaagtgattctcctgcctcagcctctcaagtagatgggactacaggcgtgcaacaccatgcctggctaatttttgtatttttagtacagacagcgtttcactatgttggccaggctggtcttgaactcctgacctcattatctgcctgcctcagcctcccaaagtgctgggattacaggcatgagccaccgcacctggctccctttaatcttttaataccatccccagtcctttacatctgatagtattcttgctttctgtaaataagctgtctgatgcacattttgaattctcttgctcaaaacatgaaacatcctatttccagtgacacttcattcttttcagcagaaatgagcattattctattctaaaagctggttcctaggagtgcagaatacactgccccacatgacaagccagccatgggcaaaatgacaccagaaaagagaatgcattcatgaagtgatggtggaaaataaaaattatgattttttaaaagatcataagtgaatgttcttatatccacctttactcatttactcttctttccttttcttaatcaaatataagaatttattaatccaatttcactattttctctttctctgtgatgacttgtctcatacagccttccattcaaattaacgtgttgtccaaacttatctctatttatttctccttctttttatttctaactcaaatattctgaaattggttcccaaacataaaggctctgatcatcctctttatctgaatcacttgagtattaactgaaaagaatagaaaaatcaaaacctccttccaagacagcactaaaaagctcaagttagactccactaacaatcagtagatcttaacaaaaaggacaagatgcaaagttaatattttgcttaaatgcgactctttagttttgggccaagaatatctctttgttttaataaaagacaactttagagttgaaccacaagttctcaaaagtccctagataatttatttttgcaatgatgtaacagtccaactttgcaaaatccagaagagaatgtcagcaaatataatcaattaatgtcgagcatcatcagagattagaaaatacttcaagtgcagccaattctacaggtccgcatttctcaagtcgctatggtcccaatatcaaacaagttctgcaaaatccgatataacatggcaccaatggtaattctgtgttcacattaaatccaggtatttcctagtacccacacaagtaaatcacagacatttctggcccatcttcagagatttttactcccaccgaaaacaaagtgggttcagcaagctgcagctgtagaaaattttaggacaaatatctaaatgtttgcataaattataaattgttattttgcatccacattttgcatcctgatacattaacagtattagcccagagaaactttcttctgaaggatgaggtccattaaggtgactgggtatgagatatggtcttgtccaaaacagacagcccaggcactggtcttcctgtttggacctgcatagatccgaacccaaagtttcattggggtatctctaggaacgtaatatactaataagtatgcagcttatgggatagaaatattagaccagtgctttgcagacttggctacccattggaatcactgagaacctttaaaagatacaaatacctaggcttttctcacagatatcctgatttaattgctttgtgatgcagccttggtagtggggggtgaggcagaggggagggctggtcaaacaagcttcccaagtgattctcatccgcatacaaaattgcaaatcagtgttttagagcaatgcttctcaaacttcatcatgcacacagattatctggggatcatgttaaaatgcagattctgcttcaatggttttgggtggggccaagattctgtagctataaacaagctcccaggtgaagccaatgctgctagtctaagaccacatgttgatccttccgtaaccgagcccagattcattctgctcatcacacgacacccaataagttgacagacatggagttggagcaaggaaggtgaccttatttcgaagacccagcagaccaagaagatggtaaactaatgtcccaaagaaccaaccgtcaacacaaatttcagtctctatgttaagggcagagggaagacaatggggctctgttcaagaggtgaccaaagaccatggacatctgggcaccagcaaggttctgtggaggtttggaacattttggccttgaccaggtcacaatgctcctataaatctttaacaaaacatagttgtttacatatctcccctttaatctcagagttaaattcaaaaaactacatgactgctgtttttatgttttatttcagtgccctaaaattatcctagcctgtgtgcaggaatgggtaaaggctgcttaaacaaaaatggaatttgctgtgttagttctttcgctgtttcactgttacgtcgctagtatcgcctgagagcttgctagaactctcagacccagcccagcatctttagtttatcatgatcctcaggtgatacagatacacattaaagtttgagaagcactgctattctaaaggttctcaatttgcaattcggctaccacctgcattcaggtgcaggcagcgccatcccttgaaacctccaggtgtctatcccctttcacatgcacagctatcctactatcccttacaggaaagatggtcttagcccatctgtgctttattgtggtagactttggcaattaacggttacagatcaacagctgataataccagatcaatgctttacaaccttggctgcacattgtagctgttctgccccacacattcatcattactagctttctgtctccggtactgcctccaatatctcttttaccacccccacaaactccacccttggagccctcaagcccttgattttaagatcttttcattctcctgttatatttcaggttctcttttcctttcttctaaccatcttaaattccatgggctttgaaacgacctcatcttgatacccacccccatgctgactggtcgcccttcaaattcagcaccactagcctcaagatagcccttggtgctgcctgcctatcactctgttacttagggcctctagtcactgactgttctaagtggcaacttcgtactttcccctttcccctcaaacctgcaacatttcttgtacctcctgactttcagctaataatcttgcttctatcaactacagaaaaaaaataagcttttaaagaattaaaattacttttatttagcagtcttcctgaggactgtagactgaagcctagagcctcagagtagccctttagacagatcctatcagactgctccaatgcagcatttcagttcacagtttatatacaggtagcaaagattcagtatacgcaaaatcgcatctaagtttgggtgcaagagtacatctgattatagtttacagaagcataaccactaaccccatcagacattaacttatgtgtaggagaaggcaagagctaaagttatttatttatttatttatttatttatttatttatttatctgggggattgtcctactttatttattttttaattttttttatttgtatgaatttaaggggtaagaatgcagttttgttacatagatatattgtgtagtggtgaagtataggctttttgtataaccatcacctgaataatgtgcattgtacccattaagtaatttctcattcccctacctcctcccaccctcccacccttccaactttccagtgtctcttattttactctctacatccatgtgtgtgcattattcagctcccacttagaagtgagaacatgtagtatttgactttctgtgtgtgagttgtttcacttaagataacagcctaccattgcatccctgttgctgcaaaagacataattttattcttttttgtggctgaatggtattccattgtgtgtgtgtgtgtgtgtgtatgcacacaccacatttgctttatccaattgttgatggactgttaggttgatttcacatctttgctgttttcaacggtgctacaataaatacatatctttctgatataataattccttttcctttgagtaaatacccagtagtgggattgctggatcaaatggtaattctatttttagttctttgagaaatctccatactgttttccatagaagttgtactaatttaattcccaccaacagtgtataaacatccttttttctccacaatcttgccaacatctgttattgttttggctttttaataatagacattctgaagtaatttatcttttgaggaataccgtgactcagggaagagacatgggggtgcatatgctctaccttgttttgtcttcgaagcatctttctagaaagctgcatatcatcacagagtcaggggccttgtgaaattatgcaggcaagcagaaatgaggaaaaaacagcttctaacatttgttactttgtctcacacttcctatttcattgagaaaatagaaaaaggtcagcccatccacctgccccctccaccacctacctgctattgtgctcatatacttggccttccacctgccaccacgggacaggtgtctgggttcctatcgaggccacctgtgcgctagctcacagtcatcagcagtcattcagccttgacacatccaaaactgtgggttgagtttcccctccaaacctgttcttttcacaatctccaggtaagtaaatggcaactccaccagtccaggtgctctggacaaaacctgtgagtcagctttgactcagctctttcctttgtacccaaagtcaaatctgtaggccaatactgtcagttgtatgttccaaatacactgtatttgttatcagactacttcttaccacccctgctgctacaagctttgtccaaaccaccatctcctctcacctcagatgtaccctgcttccacccttgaacccaacagtctcttctccactaacaagcaatgtgatgtttaaaatcctaagtcaggtcacagcacatgtctggccagaaccctttaacatcttcccatctccttccaagcagagctgccagagactctgcagaacgcagcctctcttatgtctctaacttcatcccttctcctcctcttcactcccaagcactgcttcagacactaggacctccttgctcttcctcagacactacccacacgtgcctgcctcaggtaatttccacttacatagccctctgcctggaatggccctccctagggtatctgcatatctcactctttgactcagctatcaccaagaaaccaatagctttaaatgcagccagaatcactggccaacacaatcccccatctcccccaccaggcttggatctaaatatcttctggctaaaaagcaagaaggggcgaaagttgtccacagttgtatctggcagagcatgtgccataggctaagaaggcaaccccaaaataccaaaggccgagaaatattttgctaaataagataactggtaaaatcagatcatagtctcccacagtgaatactcaacagagaccaacatctctttgtagatatatatgtacaagatatatatttttatttgtataatacagaaacatatatatttacacacacacatatcacttgcacaaagccagtatgtgaatgagcgggttaagacaagcccgaatgaaaagccacttcttaaactaatgttttcttctttttcctttttattatggaattagtgcaccaaagcaagcattattttatctttgtgcatgcattttttctgtctcttctgtgcacttaactacacttaacgttcgtgtgtacttactctgtcctttatgggatcacatcatacatcttgtgtgacttgtttttttcccctaactctggctttgaagatatttatatgccaatacagaactacttcattccttttaatagctgcacgatattccataatattccatgatactccatatatgggaatgccataatatacttattcccatttttattttcataaataacttgtccatgatcagtatatgcatttattctaggataattcctggaagtggctttctgagtccaaggcatgcacattttaacttctgagacatactgccaatttgcctttcaaaaatgcttgcctagaccgactccagtgaacagtatctaacaatgcatgcttccttgccagcacttggtagattgattattatcaacatttaaaaattgtttggctaatctgatgggtgaacattatttatttttgtcttaatttgcattttcctgattaatagtatgactgcacttctttaaatatactttttagttcttcacacttaactcttctcagactggcagttcctatcctttgctcataattttattaaactttttgaaaattgatttagaggaactctatgtgctcttatatcaataatttttccattaaatgtgttttaaatatttctccaattctgtttcttggctcttaactttatttgcattatatttagccgcacataaatgtggaaacatttatgttttcattgttgttattagttttgatgttagttttctttttttctctttgggaaggggtgttagtcgtgtttataaaatgttcctacagtttcattcagaacttttgtgatttgggcttttattttaaacatttggtccataaatctattcatccatctagtttatttctatgtgctgtctgaggtaaaggactattttttaaattttttttaaattttatttatttatttatttatttatttattttttgagacagggtctcactctgtctcccaggctggagtgcagtggcgtggtgtcagctcactgcaaaccttctccccatgggttcaagtgattctagtgcctcagccaccagagtagctgggattacaggcgcccgccaccacacccacttaatttgtgtatgtttagtggagatggagttttctccatgttgaccaggctggttttgaactcctggcctcaagtgatacgcccgcctcggcctcccaaaatgctgggattacaggcatgagccactgcacctgatcaatttttttaaagatatttctaataatttccccagtatcattaattaaatagttcttttcttttcttttctttttctttttcttctttttttttgatggagtcttgctctttcgcccaggctggagtgcagtggtgtgattttggctcactgcaacctctgccttctgggttcaagtgattctcctgcctcagccttccgagtagctgggattacaggcatgagccaccgcacctggccaattttttttaacgatatttctaataatttccccagtatcattaattaaatagttcttttttttctttttccttttcttttttttttttgttttgtttttgtttttgtttttgtttttgtttttgtttttgttttagacagtgtcttgctctgtcgcccaggctggagtacagttgcacgatcttgtctcctaggttggaacgattctcctgcctcaaccccccgagtagctgaaattacaggcatgcgcgccaccgcgcccggctaatttttgtattttagtatagacgaggtttcaccgtcttggccaggctagtctcaaactcctgacctcaagcgatccgcctgcctcagcctctccaagtgctgggattacaggccaggtgtgagccacagagcacggctaaatggttcatttttaactcagttatatgaaatgttgacctattttcctattatttgggtaactctacaagtttttagataattctttaagattttctttctgtgtatactttagaattagcttgcgaggtatagaatttggaaaaaactggccattttcattaaatctataggttatctttggaaaatatgatgtcttcatagcagtcttcctgttcagaaatctgtctctccatttctttacgtatttcttatgttctttagtaacaatttataattttctttataaaagtcttaccattttctcttatgggacacaatttttaatcatgacataatttgaatattatctttttcccataccattttctagttagctattgataacatatagcaaagcaattgttatttttatattctaacctcaaatgctaccaccttaataaattcactccttcacagtgtctcagatagttgcattggaatttcttggaatttttcatgggtgacatgaaaaattgtacatatattatctttggggtttgatattacaataaacttattaattgtcatatttaactcctctaaacttacttttttctctactgaactttttaaaataaatgtatattaatgcctttcactgtgattgtaaatttgttagagttttttttttttttttctaaagtgtttctgtgtaactatcagatacataaaagtccttggctctaatagttcttggtgaatttttccttttattatgctttttaccttatattctagtttaccttctattattatttatgtaccttttttccttcaatagccatctctttcttttatcttcagcatttccggaaaatgtatgtctcttataagcaacaaatagattgaaatacaaaaaaagttgtattttaataatgtattctattaacacttatttaaaccatatgaaattgctgttttgataggttaaaaatggtcaaacattggcaattccatatggttaaacgtattataatactgtaattacatatttatactgattcctgccatattttttacattcatatcttcttttatttttattttttattttaaatacttctccttttatacttagtacagttgtttttcttttaacatatatgcatttttttacttctccttttttaaaaacttcaagctttttaaaaattctaaatatttatagtgtacaatatgatgctttgatatatatatacattgtgaaataattataactgtcaagctaataacatatccatcatttcacatagttaccattttcttcctttttttggtgagaacatttaggatctactttcttattaatttcaagtatacaatatattattaactatagtcaccatgctgtacattaggtctccacaacttatgcgtacaacataattgaaacgttgtaccctttgaccagtatccccctattttcaccatgcccccaggcctggcaaccaccattctactctctgctcctatgatttcaatgtttttagatttcacacgtaagtgagatcatatgcagtagtgtttctttctaatagtgttacagtttcaggtcttacatttaagtatttaatccattttgactgcatttttatatatagtatgagaaaagaatccaatttcattattctgcatatgtatatccaatttttccaacaccatgtattgaaaagggtctcctttccccattgtgtgtttttggctcctttgtcgaagatccattactgtgaatgcatgaatttattcctgggctctctattctgttccattggcctatgtgtctgtttctatgccagtaccatgctgttttgattactgtacctttgtagtatatttcaaaatcaggtagtgcattctcaattattacagaaaaagcctgtgggtgttaaccttatgactccttgcatatactgaaaaatgtgtgtatttgtttttatttggttgctgacttggaagagtacagaattttaagttttaagcaatctgataattttcttctgtgaagtgtgaaactttatttgctttaataagtacctgatgaactctttatatcttaaaattcaaatctttcctcatctctagaaatttctcccttctcttccttcttacactttgccttctttccctcctccttctcttcctttcctccttagtctccttatttcaatcttgccatgtctattagagagatgtttgttcttctgaatctgccctatatatatctcttgactttccctttatattttctttatccttttcactgtcttatgaaaaaaaatcatcaatataatattctagcttattaatttgcctttttgtcatggtcattattttttgaactgtttatcctttaaatgggtgcattgttctgttatgtttatataaaaatgtcacttctacatatatatatatatatatatatatatatatatatatatatatatatatatatatatatgtattcatgttcacctatcttgagtgactgtagaagtggaacaggatgagttttccagggccagtagattgtcttcttgttatgtggactctgcatttctctacattggggcattgcttttccctcttcttcctgttgcccaccacaaagctttgtcctgtggccaatattatcacttcttatttattagcccaatagaaagaggatgaagggatctaccctcaccttgaatgtcagcttgttatagctcttcactctcaacttgaagctggctttattagcttacatccatgccagtcttctctgcaaatatttggacccatggtttcctgtggtttaatttccccagtgatcagatcttacttatgtctgtctttgtgattcttctgcatttctgattcattgatgacactcttgatggtctttcgaggcatttacaactttattttgtttcttaaatatctattttttattgtttttccatggaacttttagaagagtggtaggattcatataagtactgagtctgccatctttattcaatatctctatctaattctttaagaataaaatttaaatttagccatctttaagttaggttcttatacttcaaagaactactgtaaatacagttacccttatcaaccaaaaggaaaatataagcatattttgttattatcccaagttctgccttagaaacagctggctctcaaaaggacaattatataaaatacagtattcggtgagaactgaagtgtcaatgtagacgcaaatgaataacattgtgtttgataaagattctttctcactctacaagagatatgcttccaaatttggtaatagttttaacaatgagctatggatatgctcttttcactttcatacaagcatcaagccttgtagcagggttttttggaaagagcatggtttgggaactggaaatattaataattcccattttgtccaatcaagttttctgactttccatcaacttatctataaaagtttgatagaaatatctataacacttggaaaattataaattatcgtacaaatataaagattgaaaaataaagattatgacattgcagaagaaacaatgctatttttgtgggtctttttaggtttaactcacttctttctacactccattctccaaaatgattgtgtccttatggcctggtattttctatcatatctagccatttgtatagaaagcaaaataaagatggtaagccaaatgacaaattaagtctatagataaataaagatatatcctattgcaatgcttttgtttttgaaatatcaagtccagcttcattttctggtttagttaaaatgctgtgggaagcttctctgggactagaggacattgacctttggaaggcgttggctgctcctgaagaaagctcctggctgtttaaaggaatggggtggagtggaaatacacacagacaggaaacctcacaggtggggagaagagggccacgcccaaaagcaagtcagttcattcaccgatcagatctttaattctaagtaggtctccaaactcaattggccctctcagaaacatgtaggttactgaccttgtgtatcagatctgggttaatgtttatgtcatgcacaaagaaataactctgagtactttaaaaaaaaaaaaacaacaacaacaacactagcccttcctttttgcaggggagttgcaagtacttaatttatacaatttccattaagcatgaagattattccctagaaggaagtcttttctgaccctgcagaatatattagaatccctgtatcttgccctcaaagcatttatctcagtgaagagccagctgtccatttctacataggtacaaattctgaatccctgagtcaggaggcagagaggttagacaggatgaagtattttccgaccttctcttaggtggccatgacaatgcatcttcatgtggcatgggctgggaagccatgggctgttttttcaagccaacgccaagttccctatgactaaaggacactcctactatatatagtctggcaacctgctggccctagttttccatatcacgggccagggtttttgtcatcactggtgttttggagggaagctaggtatgaccgaaatcactctgaagtcactgtctaggggagtgggtgaggtccgaggctgaccagagttcaagtcacgcacctttctgggcctgattctcctcatgggccgagtgggtgtttgagctctaaaacagcagtccccgatctttttggcaccagggactgcttttgaggaagacaatttttccaccaaaagccaggtggggtgaaggggtatagtttcaggatgaaactgttccacctcagatcattaggcattagattctcataaggatcacaaaacctagacccctcgcatgcgcagttcacaataggatttgcactcctatgagaatctcatgccactgctgatctgacaggaggtggagctcggagcccaggtggtaatgctcgctcacccgctgctcacctcctgctgtgtggcctggttcctaacaggccacagactggtacctgtctgcagcccagggcttggggacccctgctctgtgattgttgtggcccctctagccctggtgccctgtgcatcttgtagttccaaatctgaaattaattttaattttatagacagaatactttgattcttgtctcctctccaaaaccaactgatactttattttgggtaagattcctcataaaacctaaaattataattctcttcagagtccagaaatattacttacacacctactgctctcttttctcatgataggatgagtttatagattattatttcaaataagacttttaaaattataaatagagaaacacaacatttggggatatagaataatccacaaagcagtaaacagtctgaaaaaaatgtattgaatcaaagaagaaatagtttgagaatgagttttctagaattatataatcttgtagcctcaaaaaatatgtctctttccctgtgagaaagacatataaagagtataattgattatcagaaacttggagctttaaatcataacaaaacctacatcacagctacttaaagaaaatgcattcaaggtgagacttttaaatgtagaattgcccgaccatccttcaaatttaaacagtatatgcttatgaacattctttcctacaaaagaaaagtatactttttccccaagaaatgatgctgttgtcaccaaggaccaaaggatgaagtgacagaacgatctgtggcttgggtgtagccatctgccatcaaaacctgcctattctccatattatattctgcaatgaaccagtgcagagaatgagtgggcaaagcggtagcatacggtcatccacaaaggcactccccatggtctccttgttccttgaggaaatcagcttcatttaataagggaaaggagagccaagtgctccaaagcataggcgggagaatgagaaggctcactcccaattattcagtgacccctcattacctgcaggataaaggatgagctcttcctgcaaatgcttcgggtcctcaagcttcccactgtctgtgcccagctgacattgcagcctcacccacgctgtagggagtcattaggggatggggtcagagaggtaaccagaagctatatgagtcaggatgtctaatcaggagtgaggtgggagccattataagttctgagcaaagagtgacagcgtgtgcattatattttattcttatcaattcttcccaaatgcactccacattcccagcatacaaacccactcccctgagaactccccaagcatccctgcccataaaaatctcattctgctttggtgtccatctccaaggactctcccacataaagcttccttgattcctccaacaaggtaggactctccctcctactgtaatcccacgaatgtccaaagtgcttggcttagacgacagttaccattattgcattttctgccttggattaattttcttcttgtttgctccaagaatactcgcaggagaatcttgaggctgcagcattcatcctaagaaaaccttgccatgaactattaatatctcacttgtattattttcgcattactccagtatatcaactttgaaaacaaaagacatcattctatttacagcattctggttttagtaatggtatttccacttacataatatagtaactctctagctcacggaaaatgtcaaatcctagaaaacgtagcattcctacgcgtgatgttagcatcattctttaacagttgttagccaaaaattaatttgatgaatctgatttttcctaaatagattattctgatgcagatgattttgatgttagttctatttagaactaactccaagaacagtttgtatattttattttcacattgaaaatcagtcagatttgcttcagcctcaaagagcatgtttatgtaaaatcaaatgagcgccggcaatgagctatacttttttttctaaacgggaagagggaactattaagagtcaaatgatgacattagacatgtcttgctttaagcctcagctagattgcagatccctttggtcatggattacactttatacagcaactcagcgttcttacctcagctgtgagagaggcccgctgcctccacgagctcctctgattagtttccattggccatgtaacagctagccaccctcgagtagcagttttgccagcaggtccgatagttcaagttcatccccacttctaatcacacggtgagtgatatattcatgttcaaaaaagttgaaatcacatgatcatctcaaccatttttttccaacgaaactgctttggacatagacacctgtgttacccttagagaaactgcagggacgtgttgtctccacttgctttcgggcttgtattgcactgacatctttgttacccctgttcatcacatgttttcattcccccactaaaaggcatgttctttagcctcacagatttacttccctcacctactgacctttgctcaaaatatatctgtagatgtgttatttccacagctcttccaggtcttcttccctgcttcaattgtaagtgaaatccagaaagcaaagaaccagagataaccttctacctctgttctaacaggattttgtgccactgtatcaagactttgaaaatttttatacaagaaacctttacatgcgaatcagagacaactggaaccggcccatctgcagtgccccagggcctctgtttgatttgatggagagggtatcagacgactataactggacgtttaggtgagagaacttcttggaggggattggtgaaaagaaaaacctttcaaggaaatcctagcatggccactagatgacaaatccaaaaaaacaaggcatggaagccattggttttgtatcatttatgcctttgcaagccctcctgatgccaggggaggaaggcacagtaaagtaatcaagcagctgccagagtggcttttttgtattgtaattaacctaagacctgggtcagaaggtgcaggacacaccaagccagccaggaagacacctttcagctttattgacaaattctactctcctacttacagctgaatgagacagtgatgaccatggttcttgttcttctggaaggctcttgctagaatttaaaccagagcatgagtgtcatagaaataagtgcccaaggaaaatcaggtctaagtaacaatccatgggtcaagatgtctttctcaaatgctctgcccaacttcatcatgggtttacctttctcttagggaaaaccattttttggtaacaactttgttgatgcataatacatgtacattattttggagtacatgtaataatttaatacattcatataaattgtaaagatcaaatcagtgtacttggggcatccatcatcttaaatatttgtctttttttatgccagaatcatttaaattattttcttctagctattttgaaatagaccatacattattttataaaccacagtcaccctactgatctgagttttatttcttctatcacaccatatctttgtacctgttagtcaatttctctttatctccccctcctccctaccttttctagcctctggtaacaaccaatctactctcccttcatgagatctgcctttttagctcccacgttataggtaaaaagaaatgtgatatttgactgctgtgccttgcttatttcacttaatataaaggcctctagttccatccaaattgcttcaaattacaaggttttctttctttttctttctttatgttgaaaacaatgcaagttaataagaaagaaaatatatgatttgggccagacctaaggcccctccagcactaggataatttttttttttttacatttgggaaaataaaactttattaaatcaaatgaatgggcatgtctgtttcctaagaaagacaatgataatgaacttggtggaaggaataatagtgggtaggagtttgttgactttgcttttagcctcacggtagttggtagagcatcagggaatgattaacatttttttttaatgtgactgcttatctgcttgttcattgctgcagcttcagttctgagttgacgcctgaactgccaacagtatccattattccagacacggtccaaagagggcagccagcctgcactggtcctggagctgtgattaaagttggccccaactcagtttggggaaagttccttcaacttctctttttccttttctttaataaattctttataggacggtcctgtttgttggttcccagagatgcattcttcatcctggatcatccagggaggtgtggcacctgagtggatgttaccaactcctggtatatcctgatgaccaatgaatatcggagatagtcctgtctccatccagtcaagctctggagctgtggcaggtccaagttggaggcctgctgtgggctggaagctacctggctgttcatccttttccagcttccagggactaaagtgcccggcactggctgagggggtctggatcctccgagggaaaccaacctctaggacagactgaaccacctcctgccagctctgttccacctcacagatctgagctgccatctccttggtcacctcatcctctttttcttcataggaacccaagtcttccaccagggattttttgaatcgtgcataatcctggggaggggattatgtgctcatttacatgtttccccacaggtttactggaagagtcatcaaagatgtcatcaacatgggctcctataacttccttggtcttgcagccaagtatgatgagtctatgaggacaataaaggatgttttagaggtgtatggcacaggcgtggccagcaccaggcatgaaatgggtatgtacattcactgttttgaaactttttgctgttaggtctcagattccttgtgtctgtctctcaaatctagatcatatttggactgtgtcccttaaaaaggtgttataaactgcagaaagaaaaaaaagagatattttgggaaatttcaagcattaggctgttgccaggcagtttattaattgcatgtttcaattctccagaatagacaaaaatggatctttcctgcccatattatctaaaatagcaacactgtgcctcctctagctggtccttttctgccctttcttccacttttcttaacgatgttcatcaccagttaaaatgatcttgcatttgtatttgtttatggcctgtctctgctcctaaaacataagctttgtgagaagagggattggacttgtggaatgttgcactgaataaatgaatgaatggaccaggtgaagcagacgagcagcctgcctctttattttccttttagtgaaaatgtttttctcttactcaaagtagtaacatctgtgagaaggaaacccactcatcttcaattcaggaagaaagaataatgcaagcttgttcttatagagtgcttttcaattcttggcatgaggatagagagagggagagcgttcatttattcaaaaaaaaaaaaaaaacctgtgtaggcaacacaggtggtgttattctcatcttctgggggaagaatctgagatcatggcacctaagtgatgtactcaaggaagttaaataaccaacctaattcccagtctagctcagctttctctactacagcccttctccctcctagtgacacatgcaaggttcaccaggtcagttaggtctgcctaagaattggaggcaaatgtgattaaaaagggatttactatcatgttaatgaattatgaaccacatgtccctcttaggtaaccaattagtagagagttttagaaactatttaattattcagacttgtgcagcaaataattcacattgaacaaagtaggtacctttttaatcctaacattcattggctaaagctctagagttaatagtgggtgcacagatttcttaagaaaaacatcttacttatcttcattttgaggcataagggctggagatgttaacagggtggagatgaaaacaggaggctttactccacttagaaggactgggtcaccggtgatgccccatttggagatggggcagagactggaggagtacccccagccataaggagcacagagtcagtaaccatttgagatatttcctctggtgctggtgacacccaataccagggttgttaatgaccagccagaagacacattcctgataacaaccccccaactcagtgagacagaatgctgcctacacaggcagtagaggctgaaggaaagctgcttgatacaggcagtggttcacttacaggggaagccagatatggaacatgggtccccgactccataggtttagcaaaccttaagaaactaggcagaaatgaaggtcccatttgggactttcactcagcccaagttctttctccttctgaattgcccagtttttaatatttctccatttcatttagctctccatgtcaagttctaagaaaaggactttaacatttttcaagtaaatagtgaaagactcaaagagaagccaccgtcactaattttaggcaaatagaatgactgaaacatgaatataaggagccagtcaggaaatgaataaataaagagaggatatttaaagtattccgcaacattaacaataatcttaacatggcatgcaagaattaggagtagcgtgattctgaaagccatttattctaatgaacacaggtaacttctggaaaacgtgtcttaagagaatatttaacagtacaaatgggttaacaatgaaaattggaaagctagaagttcaacaatttttagtaaccaaaataccttcttgagaacctacaagttcatgaatatttaatcactaaaaaataactcctcagagcttttaaaaatagttttcaatgttccaggggaaaaaggaaaataaaatccatgtaacaaaagaggaaagatagaaaacgaaataacaaggaatcacttaaaacttagatgacagatattattttgacaaaaaaaaaatgtacctaaaacagatttgtccattaaaagaaaaagactgagatttggccaaaaacctaagttcaactatgtgctgcaatttaaaaatatacgatattaagttaaaattatttcaaagggtgaaaaatagaaagataggtcccaccgggtacctagagcccacctccctgctgcaaccaccaaaggggctcaaaagggaggtcatgtcagtagaaggagcagcaaaggaagagcccaggaggcaggttcccggaggaagattgtttgcaaaacctgcacctgtaaatgttaaaactgagcccaaaaatacagctggaaatgatatatttccagacacatctgtacagaagtgcaaaggctatttttaagatgtgaaattatgtactactgcttattttagagtacaactagaaaatagtggaatacaaaattaagggagactttgactcctttatgggtcaatttacattccacataaatgaagcagcaaagaacaaaaaaatgatatggtaataggagacaataaggtgtctcccacagttgacaaccatcgagccagcataaccttgatctccaaatctgacaaacaagcatttaataaagggaaaactataagttactattactttatgtattttatatataaaatacaaataatattattacttataaagtaataaagtaagaagccaaaaataaataaatgatatagaagacattaacaatgtaatcattaatgattgctaatttaatagttatcaattgaatgctaaaccttaaaacatattaccactagacttcacctttttaaatcctcattgaatttacataaaaatctactatatattatgccacaaagaaaaccacatgaaattctaaaaagtagaacctacataagtcacattcttgaatcctgtgaataaagctaaaaattaataagaaactaacaagtatgagattatgggaagcagctagttgtgtacatagaggaaaatataagtcttactttactaagcaggaaagatgaaagctagtaaactgggcaaccaacatagcaaggaataaaagaaaagcaaaagtattgaattattaaagttaaaaacagaaacttaggaatttgaaatagtaatttctattgagccaagctatctgtacttttttttttttaaagagttagagtttcattctgttacccaagctggaatgcagtggtgtaatcacagctcactgtaacctcaaactcttggcctctagtgatcctcctgcctcagcccccaaaatgctgggattatagggaggagccaccagcccaagcccaacatctgtatttttaataagtcactggaggtgattctgataagcagccacaggtgacaatgattgagctagcataaccttgatttccaaatctaacaaacatgcatttaataaagggaaaagaatacattactattactttatatattttatatataaaatataaataatattattacttataaaactattacatatttttgtaagtaacatgtattttgtaaatatgtaaaaagaaaatataaatataaatattttataagtaataatataatattatacatagtatatataaaaattggcattgagactaacagtaccttcaaataacagaataacataatcaagtaattctattcagggatcaaaataatagttcaataaggagataatttaaaatattgaaatagctaagaagtaaactgattatcttcatagatgctgctaagcatttataaaattcattatccatttctctaaaattttaaatagaacataaacaagaaattcctgaatagaataaaaaatatctacctcaaagagattgtactatgattcttggttaaatactagaagtatttattttaaagtcaagaaaaagatgaagatgcctgttttactatcatttttaacaagctttgcaagtactaaacaatataattaattattcattctctaagttaatgaatatttattgaaagactattgtacaacagaataagaagtatatatattacaaaggaagaggtaaaatagccattatttgtagatgagtttattgttcaccttctgggtttcaagctgtgacctatggagggcaagtgagacttgtggaggggctgttcttggggctaccagagagagagggaattgagcaagtaggacagtgagcccatccctccactcgaaatagagttttggtccattttcctccactttacatatttaagtaatcaaaaatttattagacataaaaagattcaataaagaacaattttttaattcatacagtaaagttaataatcaactataaacggtaagagatatattagggaaataatattactactaaatataaccaaaaatggcaaacacctagggaataaacttattttgaagatgtttggaacctattgaaagaaaactacaaaacttttataaaagacttaacagaagacatttataaaaaaagacggagataccatatccttgaaggggaaaattcagtattgtaattatattaattcttccccaaacaaatacgtaaattgaacacaagctcaacaggcagggtagaggtgggtgggtagaaactaaaagcctggaaacagatagcaacattgcactctcatttgtatacgataagaagagtatttcagatcaggtgagaaaaggatcaatgatttcatgattagtgttataactggttggtcatataagagaagaagttatattcccacctcacatattacatgtaggtaaattacacccagataaattgcaaatacatttgagattgacatggaaaaaacaaaaaccaccaccaccaccaccaccaaaaacactttcaaaataaatgagtgaatgaataaatgaattgatgaaaaatatcaaatgagtaaaatgaaactactgagacaattcaaatatgaaatgcacttgtgtgtgttcccagggaggaccctgttaggaatgtcagactgttgtttccttgatgtgcgcaatgcttcttttctggtttgttgcttatgaccaaaccctgctcagttctacaacctgtgttggcctcccatcttttccaggtgaattcacctcatcctggcagaatgccctctgtgtgggaggggtcttgcaagctgactcagtgccacaggggccaccctggtcatggaaaatgggcaggcactcttccctgttggaggtgaggcagcctgctcccaacccaaccacctgccacagctgtttgcccttcaggcttctcaagcctgattctgacagtagtctattttgtcctaataccccagggaaccagagaaaacacccacagaaacctgaagggaaaagattcggcaaagtgaaacatttaaacttctgtacatagaaaacaaggttaacaaaggtaaaagtcaaagaacacaattggaaaaagttattcccaatatatatgacaacatgttaatattcttaacacttagagactctcacaaaccaccaaaaaaaagaatatcccaatttaagaaataggatacgtttttgataaggttcaaaacaggcaaaacttggccaggtgcggtgactcatgcctgtaatccagacactttgggaggcctaggcaggcggatcacgaggtcaagagatcaagaccatcctggccaacatggtgaaaccccgtctctactaaaaatacaaaaattagctggatgtggtggcatgcgcctgtactccctgctacttgggaggctgaggcaggaaaatcgcttgaacccgggagtcagaggttgcagtgagccgagattgcgccactgtactccagcctcatgaccgagtgaaaatccatccatctccaaaaaaaaaacaggcaaaactgcacagccaggatagtgtgacatttctcaacccttttgtcattatcacatcaccccaaagaatgattaagatattgagatatcctttttccctaactgacaaaagttaaaaaaaaataataacccgtagtttcaaaggagtgaagaaaagagcactctcatataccattgacagagaaaattagagagcaatttgaaaaggtatcaaaagcagccatttaactttgtaactctattttgagcaattttgtctttaaaaaatgaataagtatttaaacttgaataaagtatttaaatatgttcaagaataatcattgcagtgagactaataatgataaagttagggaaacaagtatgtttctaacattcagaaattgattaaatatatttggtggatctgtttagcataatattatttagccatttgaaattataatgaaattctttagcaccatggtcaagaacaaaagctctgggattaagttgcttaaactcaaatcctagttcctcctgtcgacctaaagaaagaaactgaagcaaaattaatatagagagtttatttgggccgaagttgaggacagcttcccaggacacacttccaagttgctttgggaagtgctccctcccgcctttgccacaagcaggtttttaaaggcaaagaggaacaaggagtgggctgatgcaaacttacctgatggcaattgtcactgatatacagaaataacattggttaataattggctatacattgctgaactataggttatgaactataggatgcccagcatattgttcttaatcattagagaatttgtaaagccctcctcccaaccatttatcttcctaacaaattatctgctatcatttaattcaaattatcaaggctcttcctgtgtttctttctcaaagatttgtagctaggtctaagaaatgtagttttgttaacctgagcttttgaagaagggaccagcctaaatatgcaatatgcctaaagtatattttaaataaatatattcttatggccttttaagttgccttaagaacgagcagtttctaaaaaattgctaccaagtagagatcttaactttcttttaaaaagaaattttaattaacatatttttacgtaaatcaatgtaacaaacacattttcaagcagtggatttgattaaattagcaatgaacgtcccaactccaattggttaatagacaccacaaaacctttcttcatgaatagtgccaattcctctcaaaccaaattattatagattccaattaatgagattttattgcatttctctcaagccttttaattttcttttaagagtatgtttcaggagaatgggactcttggaggaattgtttgggaggagaaaaatgaaagcatatctttgtttcttaaagccttttggcaatttcctgagacctagtagagttctgacaacataattgcccttctcctgaccgtgatagaaattatagcacagctcaatttcaactagcaggcatatttctgcaagtgtagaatttagtcctataggttcaacaaagccaagcacaattcaacaagatatgacagtaattttacataagtataatacttgccagcaaagtgatatctgggatgatcaaacaatgttgaaactcatagaatttcagaatttgtagatctaccaccttccatcttcccacataaataccataagatgagacacatgaagccccagagatttttaatgacttgccagtcaatgtttccacagtctgtaggtcgagaagactagacatcagttctcttgagtcccactggagagccatttgtactgccctatactgctcatagcaaaaactgaaaaccatcaagatcagaggtcactaaaccaatacagctgccccctgtttttgtacagttttaaataattggaataataaaaataagaataagacttgtgacacatgaatattatatgaagttcaaatttcagtgtccataaatctttgttggatcacagccacacccactattttgtgtattgtctgactgctttcactttacaatagcagagttgaatagttgcaacaacaaccatatggcctgcaaagcccaaaacatttattctctagatctctatcaaaagtttgctgatctagacaagtacttgacatcacaatgatttagagaaaataaatcctccagatttatagcactgagccacatttccaaatctcagttcacatcagccaaacaccaagctccttcctttagactaaaaaactctcactagagccaaatatattaagaatacaaacttcattgacatcggcacctgtgtatatcttttaaggccagtgatatcaacttgaagaagaccaaggacatcatcaatgtctgctcctaatttctcatgtccaggtgattatctttgggaagaggggcattgagggtggcaaaagaaccatgtgacagaaatgtaataccaatccatttattctgtactcttcctgataatgcaaaagagttagacctggtagtacaatggaagtcatttctgatcatcttgacacctgtgtttcttctcatagacaggacataacctaaatacgtgacctgacttttcacctagtgttaagtagcccagggttgaaaagacttaagttgcagggtccaggagtttatccagactttccctatttttcatctacctattttatgtttctattatcatccttcagggtaaagatgtgtatattcctctgaactattcaccagcctggagcccctatataatttgagtttattttagtgagcccagaaggagtagaataaactctcctaatgaagagctagaactgaaagaccacataggggcctatgtattaatcttcatcaaaggtacaatatagagcctctcatcttatcatatactactttcagacttaattctctgccatttagtcaaagtaaaatacagaaggagtaatgaaatcacagaactgaggttcagcaaggtccctagagtttagtctaacttacttttatgaaagctcatgccaaagtccagaaagtctcaataactttcccaaggtcacatagttaatgaatggaaaggccatgtgtatcacaaactcgagagtgcaagaattattcaagttccttttttttattaccaagttaatgttggccccaattcccaacctggatttctatttttagtccatattgaggctcccattcttcaagatggagcaaagcttttagattattatgcagctcccaacatcagggctgtctcctggtccttggtcccacaaccacactggtcaacactgttggcccactgtttaaatacaagccctgtggtccagcaacctagtgtctctgtcctatgttggagactgaggagtctatgttgaggatagaaactccagtatctagcgttcaagccatgttcatgcaacttgcaacggtccccaggcagctaccatcaagagatatgaatggatccgttgaccccagtcttgatcaaatcctctttaccctctctgcttcgcataccttgattcctctcctttgagtactcctaatggaatcccttcaatttgtgtaagcttctataaagactggcaggaaataattcctgctttggaccctgtatcatgaacctctctacgaacaaaagactaaacccaacctggttacttactaaacatggaaggaggggaataaaaagtttttaaggagaacgtgcatacattaatatttcaataaattgtcctatgatgtttataacaacaaagctttatatatttaagaacatacagatgcttagcatcccttgggctaagagctgccaaaatttcctgctttggaaaaagccacggaattgtgatgaagtgtttcatctctggagtcagacatgctgatttgaatcttggctctaaacttactaactgtgtgaccgtggaacctccaaggggtcttgagggtaaactaaactctcaaggttcttttttccctcatctataaaatgaagataataatagtaccaacctcaaaaacttggatgacaattaagataaggtttaaaatatttcagtacgttaggttggcacattgttaagcagatggtctgcatttatcagttctgtctcctttaagtagcatcacgttggtacctgtgtcctcattagtaaaataaggatacagttgcttactttatagaatatgtgtaggtgtgaggattagagaggatatagagcatgaggattaaattaagcaatcatggtacattgctgaacactcattacacattatttataaaaataaataaaactttacaaaaaggaaattgagaccaggggatgagagagaagttattattctgtctacttagaaaatcttctctcatcagaattgtttgatgtgaaagaccatcataattatatatctgtgccccacttaaggtttttatttacatctgatctaatatttgctaatgcttcaacctgccaaaaagcaggttgatttgtggtttctttaaaatgaaggcctgagtgagtgggcagttgaaagttacttccaccatttttccagacttcaccatgatggagggtctttaacccagcagcagtggtgtatgcttcgtaactgtatgacctagacccatttcagatactacatctggcttcttccagactatctcggaatattggccagaaaaacaaactcactcaaaaagcaatattgctccataacctccattagactggatggaagtggatcaaagaggacagcagagtaccccaaatgcttttgaagcatgaactccaagatggaattctttaagcagaatgtgaatgctggctttaatgcaagaattaccagttcaagcaaagtggcacagatgtgaactcatagctctgactcacagtgtgaatggcaagatgggacagctggcagttccccataataaaccgcctgctcttaggccaggtctaaggaacagtttatgaacaggacattctggaccaaaagtggctacggttacaatttggaaaatagtcttcacgtgggctacaaaagaagaattggtagttgtgaaacaggcttgttaataacacccacactctttgttattaacaaatgtcaatatgtaggccagtaatctctgactaaagagtatgagccagtcagtatcaataaaaattcagtagacatgcatacagtccatagatagaatattggtactttatcttgaatctaatttttgatttgactgatggcagcaaatgtggcacttggcacatgaaaataccacttagagagctgacaagaggatacttccagtttatgtttattactttattcataaggcaggttttgagcataacactgaataaatggaccaccaggacaaaaataagattcattttatgcataacatagcaatttggagatccactgtcaatagccaatctatggctgttattgactttcagagactaaaatgtcacagagaaacagaaaaaaaaattgtggatttatttataccttcagatagcattataactacgctttcttaggagttaaaaaatgccaatatttatataccaaagacaaaatgttgtacttgatttctagaattacctaagtatttgcaccaccaactgcaagttgacacctttactcaatcagggtatggcctgaatcaatgtttgtagaaagcaaagcttctagtgactactttatttccccaagctcttcctacatttttattttttgaatatgaagagcaggaagagaaaagcagcccttgattaaaaggaagatttttcattattcctttaaaaatccacctcaccctagaccagtccaatctgactttcaaaggcatgacttcctgaagtagaagtggtgaaagatcctcagccatcctaggaatctttcaggtttgttaataaaatctgagctatgaacaccaaacagagaaattccatggtaatggagtttggggcttattgttttctatataaatgaaggtaagcccctggatgcaaaaccactcttaacttgtaactcagctgtgagacatctggtcatagaaattggtcttgcatctaggagatacaaatcactttgctaaccatgtgcccactggaaatcctgaaaaaggactgtgtctggggacttcagacctcagatggacacctacatttcctttttcttctctcttcccttgttttctttttccttttccttcttttcttttcttctttttttcccctaatgagatcttgctttgtcacccaggctggcatgcagtggtgtgatcatagctcacttcagcctcaacctcctaagctcaatcctctcacctcagcctcccagatagctaggactataggtgcataccaccatgcccagctactttactttttatttattttttagagatggggttctcactgtattggccaggctggtctcagactcctgacttcaagtaatcctcctgcctcggcctcccaaagtgctgggattataggcatgagccactgtgcctagcctcctccccgtctttaagccaggtctaatggaaaggatcttgtagggagcaatttctcagactggtcttagacatacccacttctcatgagtcggctggctgttttattgcgtgacaacacatcccatatcatcctcacaacttttagtgatgcaattgttgtagatacgctcctgagatagcaggttttggaaagattaacggtggagaaagacacatggagatgcatcatgaacttctgctcatgcacttctgggtgactgggccagtttcctgaccctctgggcaggaaaggggaaatatatcaagttggcaaagtgtgggcaccctgtgtctttactagaagacttctctaggaatcagtgtcttcaagctggtattcactggctagtcaccttgttgcctaggcattgaatggccatttgatcttcttccctgtgccacctcctactctaagctcagccctgtcttcattattcatcaaaaggccccatataactctacaagtacctactatgtgtcggcactgtggcagacactgtggttgccaagacaaacatctatgacaccatcatagaatgtctgacactatggccatctatgatactattgtcagtatctatggaagtcatggcatctcacacacagtatctgcaccccaaggactctttctgtactagagaagattgccctgggaacattctcagttcaacttaataagtgctataatcatcatatgataaatgttattcaatcttggaagagaaaaatgaccagttttccctggggaagctgagaaaggcattagagaaaagatgaagggcaaaaaatggttttatgtggaggaaatagtacgtgcaacatcgggaaagcctaaaatggcatttttctcaatccctctgcaaactttcaggaaaggtagccagagtccacacagctggtaatagaagacctaaagccagaacctagtctcctcatgcccaggctgttggccttttcactgtctgttcttggaaccattcccattgggaagaagcctcttttaggtaaacgcgtatctggcaaatgatatgcccatgttttattcccaaatatcagtttctctttctgttccataatatatctttgataatacaaagtttgaaattacaatgtaaacttttaacattgcaccaaatcttgagtcagattgactactagaacacttgttttttgttgttgttgttgttgtttgtttttgtctttgtttttgttttttgagatggagtcttgctctgtcgcccaggctggagtgcagtggcaccatctcagctcactacaagctccgcctcccgggttcacatcattctcctgcctcagcctcccgagtagctgggactacaggcgcccgccaccacgcccagctaatttttcgtatttttagtttcaccgtgttagccaggatggtctcgatctcctgacctcgtgatctgcctgccttggcctcccaaagtgctgggattataggcttgagccatcgtgcctggcctttgtttttgttttaagatgaagtctctctctgtcgcccagggtagagtgcagtggctcgatctcagctcaccgcaacctctgcctcccaagttcaagcaattctcctgcctcagcctcccaagtagatgggattataggcacccgccactgcacccggctattttttttttttttttttgtatttttagtagagatgaggtttccccatgttggccaggctggtcttgaactcctgaccttaggtaatctgcccgcctcagtctcccaaagtgctgggattacaggcgtgggccacgcgcccagcctagaacacttgttttactatgccttctaataactttggggataaacaaattctagtttgaaaagcaaggcccttcagtgtgacctctcatgaaggccacagatcaccaagtgcctcttcaacatgaaatgcaatataaatgttagaactgaccattcaataccttcttaccattttagcacagtaagaaaattaacgtacagatttaaataaattcttatatcatactttgtatagtaaactatgttgatccttaggcagaagaaagtatgtttatagcggccctaaacatgctaacaatacttccgtaacttaaatctgcgcaacagctcctacgttctgtgtgtgcaaattacagcatctctccacttgtacatttatctgttatgttatatcattcagaaagcactgctcaataaaaacatgaggcaagacgcatgtgtaatttaaattttctaatagccatatttaataagtaataaaacaggtaaaatcaatttaattatacattttctttaacacagtatatgcagactattgccatttaaatgtgtaatcactataaaaaaatatcgggccaggtgcagtggctcacgcctgtaatcccagcactttgggaggccacagcgggtggattgactgagctcaggagttcgagaccagcctgcgcaacaaggtgaaacctcgtctctactaaaatacaaaaaattagctgggcatgggggcatgcacctgcagtcccagctacttgggaggctgaggcaggagaattgattgaacccgagaggctgaggttgcagtgagtcaagatcacactactgcattccagcctggatgacagagcgagattctatctcaaaaaaaaaaaaaaaaaaacaaaacaatgtgctattttacattctttttgtcatcgtactatggcttcagaaaatggtacatattttacacttacagcacatcttcataaagacattaaatttccaataattaatatgaaatgtaatgctatcaaaaaataaatttgcagttggtgaaatgcagtttactatgctttagctttacattttaagttacttaaaataaaataaaatttgaaattcagtttctcaattgcactaaccacatgtagctggtggctaccatataggactgtgcagacctaggagttcaagtgaaagcaaacagaaaatacgggcagcatcaacatttgctgtagcaaagcataaggggattatgtttaagaagggatcaaagggcaagtatgtaagagattgtaaagagataaaaactaaactttggagttaaactagattatctctgttgctttttattggtaacctcttaagcctcagttttcttatctgtgaagtaaaaatacctgcattattgggcttctaagattaaatgagagaacctaaacagtgagcttaacacagtatctagtacattccaaaggttcaataaattataactagttttattggtatctatggaaatcatgggatctgttttgcatttaggtgtgggaaaactctgatggggttataatttaattaattacttgtgagatgtagagtaaaaagagagaagaattgtggggtttttttgtaaattatatttcatttacagcatggtgaaaagtgcaccagtcataggtatacagctcaatggatctccacaaagcaaacatacctatgtaacaaatgcagaaatagaacattcagagaatctaaaaaccatcctcatgctcctaacaaaagtaactactatcctgacttctaacactgcagatctgttttgtctggttgcatattttatgtaaacgaaatgatacagcctgtacttttttagatgtctgacttttttcactcaacaacagatttgtgagatttatccacaatgttgtgtggagcagtagttcattctttctcattgctgtattgaattccactgtataaataccccacattgtatttttccattctacaatagttgaatatttgggctgtttctagattagggcaatggcaaatcttcctgctacaagcactcttgtataggtcttttggtgatgtgtacgtactggaatttgagttttcaatcttggccttgttgaaaagagaaggctcacttctcatgtaattttatgtgcaggcaccttggataagcacaaggagttggaggaccttgtggctaagttcctgaatgtggaagcagctatggtctttgggatgggattcgcaactaactcaatgaatatcccagcattagttggaaaggtgagaattgttaacctaattgtcttctactgtattactcctaagaactgtaactctgagtaggtccttgttagaagtatggctgagatgggcacggtggttcacgcctgtaatcctagcactttgggagcccaaggcgggcggatcacgaggtcaagagacctagatcatcctggccaacatagtgaaaccccgtctctactaaaaataaaaaagttacctgggcatggtggcacgcacctgtagtcccagctacttgggaggctaaggcaggagaattgcttgaacccaggaagtggaggttgcaatgagccgagatcgggccactgcactctagcctggtgacagagtgagactctgtctcaaaaaaaaaaaaagaaaaaaagaagaagtatggctgagaaggttcttttcgtaggagaaactgattggatattggtatttttgaataagtatgccagcttagtccagcaaatcttgtcatgatattgctgattatataattgcagccctagacatgggtcagaattcatcttcaatgacagtttaacaaagcagtcataattttgggctcctgagttcccatctgcaacttctcagagctaatatttattaagcatttatttggacaaaatatttgtcctacattacccatttattttttcattcaataaaccaattattgagaacctactatgtcctcatataagggaagatacaagacatacaaagatgaacaagacctatgtattttaaatttatgtagtttagagtctaatgggggaaacaatatgctgaataaaataggacaaataccatagaaaaggcatgcccatatacgaggaaggacaaagagctgcccaaaacccttcctgagaaagtctgcaatgtctgtgcaaaagtggtgagaggagaacagaattttaacagataaataagttgaattatttaggacacgaagagggaacagcatgtgtaaaatacataggtttggaggaactagaatatggaatggtggtcaaagaaaagaccagagatgaaagcaggtgccaaatggcaatgagccatgtaatgacaatcatgctggtgtttgaaattgttcctcagaaaaaaatgggaagttggctggttcattgcaagtaagcaagtacattaatcaaatttatgcctttgaaaatgtgtctcatcacaactacatgcaatgtatggtcttagactggattttgcaccaaacaacatcaaacgaatgataatgtctataaaaagcttaagacatcattagaaaagttggggaaatttaaatttgaactgtctatcaaatgatagtattgtagaagcattgaacttcttggatgtgatcactgaattgtgattttttataggagaatgtcctgttcttagggaaggtgaggtagaggcttatagataactcctaaatgttccgccagaaaaattacaaatatgcatatatctagagtacaaatatatgggaatttttgtggcttttgcctcaaaaaaactcaaagcatgctgtatgtgaaactacagaaatataatggagtattcaaagattctggaagaccacaaaagacaaaggtccaccataatttgcctgcatttttggtatgcttaagaagttttacaatttagaaatgtttagtttaaaaagaagaatacttttacaaagggtaatttacaagcagtaagttaggctgactttatccacatacctcagactgaattgccatccatacttctccaaattcaaagtttttgactgtaaaactgaagtttttgcatacatgggatgttaatacagtggaaaataagaatcagaagtaagagcttgaattgtcctgcacaaaagacccttgcctttcaggaagaataactaaaactgttccaaataatctctcatggaagtgcccctacaagttcataacccacccaaaaatctaccagtcttcctgtcagagatcaacactttaggctctacctggtgcttaacaaggatcttggatgaacttctctactgaaaactatatgcaaatgtcgcagtgaacatgtaatctcttaaaacaattcccatctccatcagctaactgctatacatgattttgtccacatagacaccaggttaaactcttggccttttaaaattaaagtgagttttagaaattgtgttataggttttagagtgtcttcctgtccccacaagttgtttttccttggttttatttattggcttgtgttttgtgtgcttgttttctgcacagggatgcctcattttaagtgatgagttaaaccacacatcgcttgtgcttggggcccgactctcaggtgcaaccataagaatcttcaaacacaacagtgagtatcagtgtattttctcaacatgtactggattgctcctagaagaaagtaaagattattgatgaggctttgttctgctcttcaaggtgacaacgtagcctcatgaaacacaattatgtttatattcactcctggcttgttaacctctggtgacctggaacaaatggttgaaatgcattaaacatccaaattgttaagtgtaacccaaacacattaatgtcactgttagtggttttgcaatgtggcctctaaatacatgattgatctctcaggactgccatttaattatcagaagtgttattactcttccctttctacagctctgccttgggaaagtttgaagacttaagttttgtgttaaggtcaggtaaaaaattagcctgttccttagaagaatgcctcctttcactttgcccacccacagatgctcagatccccacccaacaaaaccatctattcgacttcattgaaatgtcctttcagggtctggtttgtgtggctgggtggtgaggagcaggcagaaggctatttcttcttttagggtcttgatgaggcagcatggaaattatcaggaaacactttgaaggaggtggatggtggtggacatctgagttctctcgtccagctctgctcctgacttactgtgtcactttgtataaatcctttcatctttcttgcattcattttcctcatctgtaaaatgaggtgtcgaactctgtgataggtaaggatcctcctggttgaaaggttttgattctaatttgttattgtcgttggaaaattcccttctttctgtgcatgtgtacatgcatgcacacacatgcactcacacacatgcacacacgtgtacacacacaaatttgttttctctttcttccttaccacctttctctcctgccttcccttccccttcatttttccctgttcctctttcctagctctcccctccatcctccaagaaggtaacaaagtttgaagtgacaagaagaaggctgacggagaactgaggaagaattgtttcaattctgttctgcccacctcgcagcaatcttaaaccaaagaacaattgtcccatgggggaggaaagaaaatgcatgggagtattctcaagtgaacccccttgtctaactcgtagagttgttcaaatgaaaaatctatggctctcactgagtggggtgaggtctggctatgccttactgagccgctttcagtagctatgtgaagatgaacagttagagtgcagttcaggaccagaccttccagaagagccaaactatggccccctcagacttatagggtggctataacatctggcttaatgtcattcaaaatacactgacctcatttgtccattttgcatcaaacactcaatttcggctttagacttggataagccaagttaaattctttcagttctgcctgaaatatcatggattgtcacatctagactcaaatctttggcagtgttgggaattcatgtttggagtagacgtctttcaaggctccaagtaagtttattaagagactacaaggaatgcctttggtattagcacaagtgtgttgtgccctttgattcttcagcatgacagatgattgctgatcaaaggctctgcctacttggcaaaggataaaggggatagctaggcagtcattcaactgtagttccatctatgtatgtggttaaacgtgataatctcacttccagagagacgtagtcggggtgttatctctttggaacagatcaacatgatcatcatcaatgtaaaccccttgtttcttcactccattctactgcgtcagtgctcataatgctagctgcacaatagtggcatctagggaacatccataaaagatcaatgactgtgcccacctcagatcaactcagtccaaatatctgtcatatagatagataggtaggtaagcatacatacatatataaatgaccaactgggagactaaacgtaagcttcattaatcattgaccaagcattccctattctccagcttaaggcttttagggtagaaatcctccaagatgaccatcactgggttggggccaaaacacctgcatttttttctgagttccccagatgattataatgtatactgagagatataagacctagaatcttattttttgaacctcctttaatctaagctgtccccagaccttgccagtgtgccctgggatatatcaccagacacctgccatattaattatcctcactcttcctctctctactcttttacactcttgatcgaaagttggcagagaatgtgttccaagccaacatttattaagtgtttattatctattctgattcaggcactatgttagccctttgaaggactataaaagtgataagtaatatcttagctatctgagggcttggaatctagtaggaaaggtagatatgcatgcaagttactgtataaagtgaaaagggccatgatgacatcaagcagtggttaagagtataggctttggctacggtgctttctcacacccactaaaatagctaaaatttaaaagatgacaacaccaaatgttagcaaggctatggagccaccactagaatgctcacccattgcctgtggagtataaaatggcacaacttctttggaaagttatttggcaaggttttataaagctaaacatactcctttactatgacccagaaattctatacctagatatttacccaagaggaatgaaagtgtgtgtccattaaaagtcttgtacaagaatgttcgtagcatctttattcataatagccaaaatctggaaacaatccgaatgtctaccaacaggatagtagaaaaaactattatttatttatacaatagaacactactccacaattaaaaaaaaaaagcaacaagctactgctacacataacatggctgactctcaagaaaaattattttaattattttgagtgaaataaaccagacacaaacgtgtatacatactgtctgagttcatttgtagtcaattcaaaaatagacaaaactaatctatgatgatagaaattataacaatgcttgtctctggtttggagggagggaattggtgagaagaggcataaaagaactttctggggcaatcttttgatggggtgatggttacattcttatttaaattcatcgaattgtacacttaatatttgtatgtttccctgtaagtaaatttaagctaacaatattattataatcatacaacatatataaaattaaaaccattgctccaatattttaaaacaaagtacaggctttgacccatgcatttgtgtcctcatcctacagcttattagactgtgaaactgtggtcctagacacactactttaccttctggatctcaatttttctattccaaaaatgaggataattatgatacacaaataatactgtggttggaaaaggcatataagtgcttagcacaatgcctggcaatgggaactactgaattatttgtagctgctatgttattactattattaccctcgtcattgtcatcagtgtcactaagggacagtagaaaacattatggaaaaatgaagagtctatttctccttgggaattgcataaaatggatggcatttgcagtagatgctgaaggattaagataattctaatcagggaagaagaaaagattatttcaagcagaaaactaatctggagcatgcagagagcagcaggactttcagcatgacctgaacaatcatgctaagaatgtatgtacttcaaaaagcaacaaaaggcacctgggagttctgcttcttaccatgctgttccccagctaaactggtttttctcaaaacatttagttgccttctccatatgtctagtagagatggaaacagagacacaagctttaagttaaagctttgaacagcactggatgaaaaaaaaataataattctgaagatcgtctgtctctacagcagtgttctcttagaatttctctattctctgtttttgtgttgttttgttttgttgttgtttttccatttgctattacctggaagtcatcagtgaggggcagatggaccctgtgtgtctccagatatgataccctaaaaagcctttgacatcatttatatgggatgcaggttagagcactgaatcctgtcaccagacaaccccaaattaggaatgttctatttttaaaaagggaattgtattctctaaacatgtcaataccataagagacagtgaaaggctgaggaaatggcccagattaaaggataagaaagaacagtatcagccaagtgcaatggcgggtcctagactagattccaaaagagacaggaaaatgcataaaggaaattactaggccagtttgaaaaattggaagatgcatggtaaattagataatattagataagaatagtgtatcaacattaaaaatactgaagtggatcatttcaccatagtccaggggtagacaacttatgacctgtgaactaagaacacttttacatatttaaagcgtcgtataaagaaaaagaagactacgcaacagagactgtatgtggtccacaaagcctaaagtaaaactatctggcttttttatagaaaaggtttgctgaatcctgctgtaattgtatgagaataccctattcttaaaggggagaataccctattcttaaagaagacacattgaattatttaggggtaaagaccatgatatatgcaactttgtcttaattcagggaaacaattgtgtgtgtgtgtacacacacatttaaacacaggtggacagacatagctataaatatgcatagacgagatgattaagcaaatgggataaagtgttaataggtgaatctaggttaaagtaagtgggtgttctttgcagtactcttattcttggaatttttctattacgtttcaaattatttccaataaaattttcccttaaattcttaactttttgctgaaattacaatttaagggttaaattttatctcccaattttacaaagctctcaaaacattcagtaacttattcttcatgccctccctttgtactcatgaaaaatagataatagttactatctctatcctaacaatgaatgttagctgttgttatttagactagcaactaacatttattgagaaagtcctctgtgccagatgctgaggtaatggccttctctaatttatttagccctgtgaagaattccatgaggtaggaactgctttacaaatgagaagattcaggcttagagttattaagcaacttgtccaagatcatacaactgattaatagtgaagcctggagctatctgggtaaatactgcccttcccaactaattgagaattgggtgcagctagggtcagagtctgtcctctaacccatgggagtctattatgcctgagctgctgttgctcttctgctctctttggtaggaaaaataatgctcaccctccaaagacgtccatgccctcatccccagaacctacaaacattatgttgcctggcaaagggaattcaggttgcagatggaattcaggccgcaaaacagctaaccttaaagagactatccacgtaggtctagtgcaatcatagggttgttaaatgtggaaaagagtggcaaaagagtgaggatcagggcaatgcaatgtgagaaagacttaaagagcccttgctggctttgaagatgaaagaagaccacaagctaaggaatgcaggaagcatttccctagaagccggaaaaaccaaggacatggattctcccctagagcttccagacagaaatacagccctgccaatatcttgattttcacccagtcgaacccatttcagacttctgacctctagaactgtaagataagtttgtgttgtcttaaagtcactaagtgtattctaacttcttacagcagcaataggaaaccactaggctttcattcacaggtgcacagaacccttgttcccacacacccacatgtttaatacaactttgaaacacgagcatattctgctgctgttgtatttacatcacaaaaacagaccccttgagagcagttatttccagggtcctctgaatgacttctttcttgagaggtgagggaagcaagaagtataaggacagggaaagaactgaatggagttataatatgtacagcatcagatgctgctggctctgtttcttgctctgctattcccaagataatactaactgctttagtatgcagtgatgtcttaatccttcatatgcatccacacagattggactgataatacagggattgtttaggatctgcagaaactgtatgtgcatgacacacacaaccagtccagatagaagctaataacttgtgagacaggttttaagaatggccacctgcaccagagcattcttaaacaatgggattgtggaatttcatgcaactctaaacttgttctgctctcacagactgtcctctgcttcatgtcctctccttacaccttaacaatactcttctgcctgttggagaggaggaggttctattttttagcagtaccaatggaagtggacatcctttgttatttaagccaactataaatgaatcagaattctgggcccttggattttttaattctctgtaggaaaaaatacctaagatatacttaaacctactcagaccatcataataaacttttaagcctgtgtaaataggcttgaccattaactccaaagctattcattattattctctctccatttcccacaaagccagaatgaatacctgagaagactaaatagaaggaaagttctgcaagggagcaaaatcagaacaccgaaagtctatttcctaaaaaaacaggaaaagactcagaagtgcatttttagtgatgctaaattcaaaactgggtactagagccaggcctggtggctcatatctgtaagcccaactactcggttagctaagatgaaaggctcacttaaggccaggagttcaagaccagcctgggcaacatagcaagacctcatttcttaaacaataacaacaacaacaaaaaaaacacctgagtaccagaatcttttatcaccatagattagttcttctataatagtacatgtggataatagctgagtcataactactctatcatttattcagctttcactggtattaagttcttagctaactggttcatttaattttaacagcaacccagatacagagttcttttcattatcctcattttattaaagagaaaactaatcctcaaagtgattatatgacctgcctaaggtcaggcaaatgataaatcacaggggtcaaaatgcagacccaagtctgttgcttttgtcttggtttgcttcccccagcagcagaccttgagacacggatgtaatcacaagtcacttattcagaaagtgatgccaggaagcaccagtaggtgagcagggcacaggaagcaccagtaggtgaccagggcacaggaaggcagccaacatggtgcattgtcaagcaagtgaccagagtggacaacaggacctcgattctactaggaaactctgggtgccaggatagataactcactgttatccctacctgtgggctgagggagctgaagtatttacccacaaattcccatttgtgactgattgaaggctgctccctaatcaggctatgttcccacagccagaaaaagagctcttaggcaaagaatggcctgtgtttgcatgaagaagctgggctgagagggtataggcaggatgtgcacagcacttgttaacactcttaaccactagctgagtccagctatttgctgccaggccatatgtaggagtcagaaagctatggtcccttgtgtaaaactcagtccagtgtgatggctaatggagccctatcctgttagtagcctcaatttcaattcagaatgctgaagtttggcctctgcattcttgctcgctgagtattaaaaagatctctttgcattttctactgtgggcagcttcagggacatagccaaccctcaggctgcccttgtgctatccagccattctccagccatttcacggcctcagctacagagtcagctgcaaccaggaaccaacacatttgttctccatggtgtttctggtgcattttgaggaaatgagcaaataatgaaattatttttccccaatatttctcaggctttcatatgcacacgaggtacttgggggctcttgttaaaatgcagactctgagtgagcaggtctgggtgggggcctgagatcctgcattctgacaagctcctgggtgccgctgctgctactgctgctgctgctgtcatgcagaaccacactcagagcagcgagactgcaggcaacctcggtcctcaagtgagtcactaagactttcttaagctagcctcggagaaaagctgtttcttcagcttagagagttgtcatgaggtcagaggtccaggcaggtcaagaatttggagtagtttaaaagaaaaagtggaaaggaagaaccaaaactctgcctactaaagaccaagaggaggaagaaaaagaaggccagtgtttgccagaaaactctgagcactacctagtctgcagaacaagggctcgagaggttgtttaagtaaaaagttaaacccgtaaacatggcttagactactttgcaagccatgatcttttatatttcaatgtccaacttggatttctaaactaggttgcttaataaagccagcaattgcctccctatcttttaatgataattaaaaggtattgagccttcattgtaatgagccatttacattcaccaactcattttagcctcataactacaaaatgaatcacctgctactcttatctcctttttgacagatgaagaagaaacatctataaagtggtgaagtgacttagatacacagagctagtaagagtcagagctggtaaacctaggaagtctgactccagagtctccgtttttaagcatgacacgctacctcctttcctggccttttctaccctctgtttgcccctggatggcagagtgatgaatgtaatacttggtagcctccatctcccgtacacctctcccagggccaaggcagttttggttaggtagatgctgccagcacccacctgactgagaatcctaaccactgggctcctacactgttccctgaatcatgtctcaccttggtgcattgagccccctcatttagagatcccatctcagtactttgtctcattccacaatctccttcctgaggatcagaatcctatgcattacatcaagcccagagcccaagcctattggacaccctgtccctggtttctaggttctgcctgtccttcatctcatgcctacagagtcaaaagttgctgcaattaccccctccccctgcagggtaaacaggccctgtccctagcacctgcctcatccataagcccaacccaggtcacctgctctcagctgtcttttgcactcttccaagaagatccctttgcttctttcaactgcctaaggctgtgcgacatctatccacatgtttaaagagccatccagaaaacctgagccaaagtccttgcacaatctgctttataaaacttaaaggcaccagattttcagtcaaaaatgccctctgtgatctcatggagaacagaccccataaatgtgactttcaaaaaataattgttttgcttgacaaaattggtcattgtgattttgtttccgccgaaaggctaaaaaagggggacagtcctccccaccaccatcttaaaagtaagaataatttctttgtcatcattcatagctatttaaatacccgctacttactatttcacatttgggctgaatcttgaaggatgaaactgcatgtccaaaggaataagaggagtggatatagagatggggggtaagggactaggaacagtaaaaagtgacattcattcatcatccatccatcttttcatttacaaaatatgagtgccgctgataggcagacacaaaaatatttttgctgagcaacccagagagtagggaaccaaagggtgtctctaaatgcagatgaaagtagtttttgtggggtcatggatgacaaagaataaaccaccaaccacaccaggagcatatggaaagtggaggctgagtttcagccccaatctcgcattcctggatccataggagagggagcaggggcactgagaaatgggcagtgagtgaagatctcacagtagatctaggcctttggaaaacccacagctgcacaagagaagagaaaggaggaagccctgatgtatgcaacagtgttgccatttgacagtgaaataagaggaaagctaaatgtctgggttttttcttccggaagacacactatgaactatgccctaccttcttggaagattctgggtcccttgctgccttgtgctttcttttcacaaaactgcatcttcagcttttccagatccaggaggcttgctattattagggttttgaatgtaagaacaggcacaggctcaggctggctaagagcatttgtcacctaagcctgattgtagctttggacacatagttggattattccaagtatttagtaattcagtaatccagttaactatgctggcaaaaggctaggactgttttgcactaggcaccagaacatggtctccacattttcatttcttatagctagatatttataaccatctgatagggtttggctgtgtccccacccaaatctcatcttgaattgtagctcccataattcccatgtgttgtgagagggacccagtgggagataattgaattatgggggcggttccccctatactgttctcgtggtagtgaataagtctcacgagatctaatggtgttataaaggttttcccctttcacttggctcccactctctcgtctgccatcacgtaagatgtgcctttccccttccgccatgattgtgaggcttccccagccacgtggagctgtaagtccattaaacctcattttctttataaattacccagtctcaggtatgtctttatcagtagcgtgaaaatggactaatacaccaccaaaccagctcaatccttttagtcctctacaaaccaaaagaaacctccttagtgagtcaaattttgtgctgagtaacaccaaggcattattaatgctcaaatagtggtcattttaagtccgtggtgtgtcattgtgactcaagaaccacactgtaccatagcaccgtgtgtgtgtgcctagatggtgtcaaaattatacttttattttaatttccgtatctcagaattttcttattaaatcaacaagaacaggtttgtttggagggcttttgtttggggaactttttttaacaaaacttctggcattgtttttttcatctgcaaaaaacaaaaacctaacagtccttccctacttctcagaggtgtcatggggattaacataatgcaagtgtaagtgccttaataagcatcattattttaaaaaaaatcccttgcagatgtaagcatgcagcttgctgaaacggtagaatcccataaggcctacagaacataaatcacaatcccttaaatctgcgggtttgtaacccacgcactgtagccttgtagaacgacagagaaccagagaggaacatgccaggggctaaggtggggccagaatccaggccgagcgcagtcttcccttttcctgtgtagcttctgtgattctaagaggtcggagagttcatcccctgcaggaggaaaaaaaaaatggctaattgattttccttctgctcaagaatcctggtgtgttgaccctggggggctgtgaactccaccaaaagccactcccatggctatctccattcaagtcaaacacaacgaagtccctgacttggaaaagactgggattcctcttgcttccctccgcaaaatgtataaaacacagcgcggccaccgaaagtcttgttttcatgtcttgcgtgttatttttaaaaatggagaaaagcttctctttaggactcgtggtgttcattttaaaattctggattaatccatcgtgtttatgtgacctttttggtgcaaaaacaacacagtggcctctgaatttacatattttttccaaatcttagaatattcattttaaaatgactactaatttagttcacttgggtttagtttttattccagtgtcgtcggagccacatttaccatctatcatttctgcacaaaaacttataaattccaagtcccaaagggaaaacattcttaacaggaatgcttttattcaccatctctttattccattcagaggatttggttatagaagatgaataatagtataaaatattatagacataataaataaaagattataggaaaggaagactggttctccaagtcgcaaggttttcttcaatattttaggaactctgcctaaagcaaaagtgaaaagaagatacccaaataggtgaaagtttattaactgaaaatttcaaaacaagaaagccgctttttgtttccttggctgccatctagtggttaataatgtacgctaaaacacgctcttgggaacgttcaaaaaatatctatctgctcgttttaaaacaaaacaaaagataccatcaatttttgaaaatatattgcaggtaggagatatttatcttttctaataattcttatttctatccacaagtggcatttccttgcctgtctcctagtctacgttctttctccaggaaaagaacattgatgcaattattaggtaatgattgagcctagtactgtgtactaagactagggcgagaaggatgaggacgaggtccctgacttcatggaagagagacatgaaagcaaaaaacgaacatcgcgatgagtgcttaaaaaataatagacaagtcgggagggacaccaaggaggaagcccttaactctgttctgtattattgacgagaagagtttgggttaagacttcagtgatgagtgagcattctccagacagacaagaggaaaaaaagcatggaggagaatcaggaggctgtgtgttgggggatgttgacaaactatgtcagaaagacaggcagaggctatatcaggaagggccattcgagattgtattaggcaactattactggaacaaacctcagttgccaataataatcagcaagtatttctcactggaggctgcaggtgagctggggtaaccgtgccctacgtgccattaatcctctcccagggccaacctgagaccagggggctagcctgggcattttcttttcctgtcactagcagaagcacaagagaaagagtagaaatgcataagacctcttcagatctaggtttggaactagcaaactgtctcttctctgtattccgttagccaaagcaagtcacttggctgaacccaagccaaggggcagggaaacgttctccactggtgagaggaaaggactgcaaagtcacagaagaaggaactcaaatgaggtggaaaatgggccagtaatgtagtctgcagcaagttccatcttggaaatgggtttgaggttcccatatttgtctaaaaaatggtaagaaaaacattatatcgatcaaagtagaggtctcgctttgcgttatgggttccagaccccagggatactgagcatacaaacgtctgggccctgacccacaccaactgattcaaaatctctgagtagaaatttcgagaatctgcattttaactggttacccagatgattatttctattcatcctgaaggttgagaaccactggaagattaatgagaaaatagaaaaaaaagtcaaggagaaaacataaaaggaaaatgggttaaaagaggaaatagtgctcacaaagaatactagaaatagtgggaaaaggaataagaaaaactaatgaaaaatggtgtccagatggcagagggaagaagcttaaaagataagtgtgtgttgaattgtgtcaaatgctgcccacggtcaagtagaacaagaactgaagaaagctctgtaaatttgtcaattaggtaatattatgtgaaaagaacacaatagtgatgccaggatatcaggaggcctgttttgcagataaaaagagaaaaaaacaaagaaaaggaaagtggcatgaaataaaacaaagatccaccattcttccaattcttctttcacgggtccttacgatcttggtgaaattgattaattccacatttaaactgacaaagcacctaaagagttagtttctggctagtgattaaagaaaggaaaggaaaatgaccttttttttttttttgtatctgttggttctgataacatgccagatattattggtagcatacaggtagcatactatatctaatacctaaggctttatatatttgaataaagaattattcccttaattcttcattatttcattatatatttcctttattttttcattatttatgtgatgttttcttaaggatgttaaaggaagtcaaatagtgtattaacactactgtttggatttccaagagatcttgctagtatgcagcatcttattcatgtcacatgctttttctgaatttcaggacccgatacccagtctctagtgggtggatgctgaggacagcttggaaggtgccatgctaacaggggcctctcagagatgaggttctgatattgcactatcaaattctgacttgtcctatcccactccaagtcataggaagtcacctttatttaaatgtggtttgcttaaatgtacttgataattaaaaagaaacacacacacacaaatatattcacaactctatttcaaagaactatcttgtggcctcattgaatgtggcagagttgcagtgtggaaaagttaatgcagccactaatgcattcactcagctttgggggaagccctaaaacagatctgagcacagactggagactcaaagacaaagttgaagggctctccattgagaccaagaactgcagctaatttgagcctagaccagtgagtgataagccaatgcacatacgcttcttgagagctttgtctgtagtggtcaaaaccagtactgactatgcagctttagatttatctttttttttcactttgagacagagtctcgttctgtcacccaggctgaagtgcagtggtgtgatctcggctcactgcaacatccgtctcctgggttcaagcaattctcctgtctcagcctcccaagtagctgggattagaggtgcctaccaccatacccacttaattttttgtatttttagtagagactgggtttcaccatgttggtcccgaactcctgacctcaaagatttagctttgctagatgtcaccttttgtgagcattttaaatggtgtttctaatgcctggtgaacattgcataacagtcaagccagcagttaagtagcatctccatcttttaaaattaagattggattctggacctaagtatttcagtttcatcttctcaaaaaagggaaagcttaggaaatgcaaaaaatacacagtacaaatataatcagtctaaaaaatatgcccataaacctcggccatttttttcttgctaggcttaaatgttaaaaacaaaataatacacacacatgtacatatataccaaacagctaggttggtaggcaagttcttctaaatgacctctcaacccaagcccagtcatcaacctctgatagcagataaatgaattgtcactattgattatatttgacattagaagttaacaagattattctgccagacattcatcctcccttgttctacatcaccatttcatttgagaagaagggacaatggctttcacataaggcagcaaagggtagtgttacaaatgtggattacagtacagactacatgggttcaaatcctgattctgttgcttatgatagacctcaggcagtttactcaactcctctgtgtctcagtttcctgaaccacagaatggaaatgctactagtacttcctccagatggttcttatgaggattaaatgaggtatgacaaaaactgagcttagaagggtgcctggcacacagatagggctcaataactgtgagctattattgtgttcagagatccccaaatattttgaaaaagaggcttaattgtcccactgctttaaagttttgaaacttctaagactgggggatgtcagaaatcaaggctcaaagtgtaggaagtgagatccgtgcaaactcagctaaactctaacatgctcatgtctacacgattgatgagtggtattaattatgtctctcagagttcatttcagcctgcaacaaagcttagacctaagagatgcatttaacgtagaatttcaatctctctaaggcaggcggggagagcctttaagagcctaggaaaccatgccccactggtgagagtttactctgcctacttgtacaaatccaactatttgtcttgtcagagttaagttctactgaaaaatagacctctgtctctctctccctaagggttctctgattctgaatttgttctctgaaagtttaggtctgagtgtgaacataaaacatctggaaaaagaaagtggaaaaggaaaagtaaaccctttcatgactcaatttttttttttggtattatttaaagacacacaaagcctagagaagctcctgagagatgctgtcatctatggccagcctcgaacccgcagagcttggaaaaagattctcatcctggtggagggtgtctacaggtatgtaaataacaggacacattttacgactcggaggcctgcagcaagctgaccagtgcggaaaggctcacctttcctagctaaacagagaaatgacttagaattggttatatgacacagggacctgagacagagccaccaatgggagctgtcagacgtgggttatctgtctttttgatgactctatatatggcacagcagcttggaggctggccggcttgtgaaggcttcctcagaaatatcctctcaaggcattgctaacttgagttgatctttccactacctttgactgccccagagtttcaaaggcgtttcgcagctgggttattcaagatcaaaacactccttgcctttatgactggtagaaattgttgatgggtggcccggatgcccctacctggacagcacgcccaacccccagctgcttgctgaactttgttagtgattgccatcaatacaaaagatctgcctgttttccccaaggtaggagtaacctggggtgcaattcttgttccagagccagcgggtaggaatgggctgatgtctagtccataagccaaggagacattatttcagagtgcccaatcctgaatcaattctcaaacaatcctgacgttaggcaaattgagggggatatctcctataatgatagaaaagtgaaaaatattaaaaggaaggaagtgaaggctgttcaactttaagacaaggaggagtgtggctacaaaggagacttgaggatagacataggatttctttcagcccgctaatctcattagtccctgagtgcacattttttctgctgcatgagtggataatgagcagcagcagaagtgtgcctttattccttttaagaaaaaaaaagtgaattctcccaactctaaaataataataataagaagcttggtttcattttatttttaacatttttaactccagtacttctgcccccatggttagggttctggatgttcccagtcctactgtgggaaatgcaaagtttgcatttccagtttctaccagctcactttctgcatcacctaccattacctcctccagccagcccagagagtatgtactgttgatgaagtctttgggagcactctagacatagtagttctccagggtgagcttgtccttgccccagcctaggcacatttggcgattttcagtcattataactgcagtagtgtgtgactggcatatggtggacagaggccagggatgctgccaagcatcctacgatgcatgggacagcccctacaacacagagttatctagctcaaaatgtcgatagtgctaaggctgagaaaacctgttctggtataactgacaactcgtaggccttaacttgcaattttaagaaataatctcatattgactctgggctgtcataacctcaagcatggatctttttccctgtgtgatttgtgcctgctgccagcctgggaggggagcaaatagcccttatctaaacacctgtcattcaggcctagattcgtgggaacacagatcagctgagagagagcagactgggcatctcctttaagcagagtaaacaaaacccaactgcaaataaatagaacttggctccagtaaatgaaagttaggtcttaaccattttgatcatggctgaaattaagtagacaactggcattttactggcaaatattcccatcagctacacagagaaacaactccagcagcagggcttcttagtggccatgccaggcgcctgcatcccaccacttcagaaggacaagggacccaggtgtggacttccagctccaagccagagtggtaccaaaccacaattttggttgcactagcaatagtgactgctcagttacctattgccatgtaacaaaccacccaaagcataatggcttacacagcaatgatttattatttcccacgctaccgtgggttgtgtggaccaactgggcagttcttctactccacatggcattggttggaggcctctcatggaggccacttcattcagctgacactttgtctggggctggaacatccaaaattaccccacttgcacatctggccctcggtactggctctcacctggagtgccatgctctcttccacacagctttctctatagatagtctcttctcattctgtagtctagccagaactcccttacaacgtggtgctggcttccaacagagcaaaagcaaaggctgccggcactgagacattatcacttctgccctgacccattggctcaagtacatcatgaggccagccccgattcaaaagaaggtgaaatagaccctaccccctgatggaggatccacttgtatgtataaggatgggaagctttgcaggcagccatctttggaagccatccaccacagtggctcaatcaacctggtgatgacacagagtgaagtccccactttccaagaattttccttcacaagaaagttcctttcatttcacccacacaggaatgttgactttaaatgagaccaagacctaaaaggccacattcacagataggtaacagggcatctctttgacaagcctcaatcgctcttgggggcttcaatttcctcatctgtaaaataaagatagcctagagttgagttctacagccttaaacctcaaaggaaaagcctttatacaggtgttctaatttgcaactatcaccagatatttcccataaggccaggtgcagtggctcatgcctgtaatcctatcacttcgggagaccaaggcaggtggattacttgaggttaggagttcgagaccagcctagccaacagggtgaaaccccacctctactaaaaagacaaaaattagccaggtgtggtggtgcactcccataatcccagttactgaggaggctaaggcacaagaatcacttgaacctgggaggcagaggttgcagtgagccaagatcatgccactgcactccagcctgggagacagagagagactctgtctcaacaacaacaacaacaaaaaattatttcccgtaggattttccaaaggagggttaggaatgtgaagtcaatagttcacaaatgcactcctacttttcggaggtatattaggaatgcatatcttgttggtacctacacaaagcctcctttgaattttaacttccagattttttctcttgcttatggtctgccaccatgggtaaagcacccccacatacatcagcacagagcccacatacatcaattttttcataacccccaaagagagcagtcagccaaatcagaaagtttcagggagatatcaagatagaaaaggctagatacccagtctgagaagtcagacaactccacaaaactaataataataatgtcaccattcataggtattattattcatatgtagaatatagaggagtcaggatttggaggcaggcctgggacctaggttcaaatcctggcatcaccacctacatctgtgtggcctccatagggtactttggtaataataaatattcaatgaggtcatataagctagtgttggcagaggcccagcccatagaaagctcacaaccaagagtggctgtctttattgtcacattgattttcagtctaagaagttgcaactcagaaaacaataagtcatctatgttgcaaggctgtttgctcttcttccatccagaaagtggctgttagagaaagaaactcacactgaccatgtgtctactccttgctaaacatttcccatgtgcagccttgagtaagcctccaagtattcctgaagttattgtgaatatgaagaaattgaggctccgaggcttagattacttgccccaggacagataaccgagatgaggcagagcggggattaaaaccaggtggccctgatgggacaaaggctcaatgtaaatagaagagtcagcccatgtgtccacatccaatgaagtaaacatggaaaatgcaagatcacccatttgacctttaccattaacctatctaggcctcagtttcttcatctgtaacacaggggcattgaaacgtaaaacccaaagtttcatgaatgcatgatttggggtttaaaactaaaatagtattatttcagtgttctgaactgtatgttttcattaagtatcattttaaaatcacattttctaatttcatgtctctgagaagtctagatcccttatcaactcatagtggttgagaatctcaaaattattcaaaaatatccttgaggtgtggtgtcccaaataacctgggacataaactagcatagctggagcactaactttcaaaataaaattaatcaaggaataatagtcagctcttctaaaacaaatacatatataaacatatgcacatatgctgtagcctcagaataccatttactctaagaatgtaagctattctcctatgctcaaaataatgtaaatttaaggattgagaacttcagtggtaaactgtcacctgtatctctatggtttaaacaaataaagaaaagaataagaaaacatttgttactttacttttaattgaccttaactttctttttctctctttccaccttgctttcttgttttgagttacactttgggcccaccaaggagatttttccaccatgtgagttagctagccggtggtttaattctccatctgccagtggctaatatggtttatatgtggagggaaaagtggtgagagggagatttcaaaaaggaggcttttcacttagctaagacattatgtaatagaaaagatataaaggaattattcactggcttgctggtttaagaataattcaagtccctgcacagagcttcaaattaactcgtggaattatctttacctacagtcgtgttttagttgtttttcttctattgaagtcaaaagaaaaacacaaccttccattcaggaagaaagaataaattgctgttcttgttttctgtatcatttttggcactgttttttgacagcaattcatgggaataacatagatagcctttttatgcatgcgctagactcaatatcccactgtgggaaaaggctcaattcaaatttgatcacattgtgaaaatgaaaacttagtgtgggtgaatataactctataaaagctgagttctccctaggactctgtgtgtgccctgcattaactccaaaagtcagcagtattgtagagtcattaatcttagaggaagaaatataaaccaggtgggcaggctcctaacatcagctagaccagccccatggaaggatggttaattagctgcccgcagtgtctacaaacactgtgggccattaactttggcttctgtcaaattcagttccagaacaaaaaaatggctatttgtggcatgtcaggttttttggcatatttgtgttaccaacttataacattttaaagagaagaaaattctagatttctgaggacctgcagccatttattatgtatgacatccagcatgacacccacatgcctcgctcctataagattcaacacagaacattgtcaagggctcccactttcccaagttaggactcgttgcaaccatttcctcctaagctcctcctcctgagggccgtaacgattcactaaatgcccatcatggatcaggtagtttacaagcatgatttcaagtgattgttataaagaccctgtgaagaggggcccatcatcctgtttgtattgcatatgaggaaactgaagcagagaacatcacgcaaattgcccaagctcacagttagtaagcttaggcagccagatggccagactgtcttcccctcaatggaaacaattttaacaagcaattaatttaagaacatgttggaattaactcacaaacttacataagaaaagacaactgtatttggcctttatttcattaaaatctgaactcggccatccaaaactacctcgtggaacacacaaatgctgcacccagtgatcatgatactctctccaaaccaacacccgttggtctgggtgactgtgcacacagccagctggactgttttgactgaatcgacctaacacttaagcttattttttaatacattaaatttaatctaataaataattaggggaaaaaggagacgttcaactctgtttgattcaatgaattagctcttgaactaacctaaacggttgtttgaattgtttgacaagttcctttgtgtggtgagtgtgtctgtgtgttttcgtacaacttgcctgtcaatgcagtcaaaactgtgtgcaacatagacacagcttgcaaagtgttctgagaactgattactgtcagatttttttaatccattgagtcccagaggtgccatgtaaatagaaattttaattttatttattcatagactacatttttttccctttgtgccggaggatgtaccaaagcttcccaggaggatctttgttaatttagagcatttctgtctctgccctagcatggaaggttctatcgtgtatctgtcccagatcacaggacttgaagtgcttttgcaacttacaatatcatgaaaaataaaacagttagggctaaaacaaaagagttcatctacagcagtggccctctatatgtggtccgcaaccattggtggcagcatctcctgggagcttggcaaaaatgcacgttctcagcccacccaataccgactgaatcagaaactctggggtaggagtctagcaatctgtgttttaacaaatccttcagaggattctgatgttcactcaactttctgttcctctgccctaaaggaacagaaagaggagacacctcggtctttgacttgaagtgggtattgaacaagaggtctcaaagacttcctattttactttaattaacactatgatgtcttaaataaagttctgtgtctttttaattccctcttttaatctatggcaattcaagcaccaaatttaagtcaaacagacctggccaaaaaggcaatgccaggctgataaagggaatgactatagggtaatttaatcaattctagcagaatatctagaatccagaatggtcagtctagttacaccagttggctttacaaataaattggatcaataatgcagtgagctgattgtttgcttgagaattagctgaaaccaaaagcacttaaatccattgaatgtaaattattttatccaagtagcatagaaatgcccaagtggccttacaagattgaaagggttgtctcagccaaataaaacatgccttcagaacaaaggaatggcgtgtgtcagggaagactgtctaggatgtattgatggggaaactgacagagcttcccaggagggtatttgttagttatgagcatttctccttctgccctagcatggaaggttccatcgtgcatctgccccagatcatagctctaaagaagaaatacaaggcttacctctacatagatgaagctcacagtattggggccgtgggcccaaccggccggggtgtcacggagttctttggactagaccctcatgaagttgatgtgctcatgggcacattcaccaaaagttttggagcttcaggaggttacatagctggaaggaaggtaagagagggcctgcttgtgtctgtttaaaacctgagcgccctggggatgccgtgtgtagggcttctctgaatttcatgaaagcttcaattcagttcaccacacctcagctgatcactccagcctggctacagtgggttcacagccagataaggcccagaatatcgaggagctctccctcgaatagtgaagaggagcatgtgatgagtgatcacactataatgaaatggcaacactggccgtgtacataagatgcaaagtaccaggcagaggaataattaactctgttaagtagtatctaggacatggtttagaatgaatatccatctggtagacaaataatggggggccatatttaacacacagagagaataatgtataccaagccagaagtgataagggatgttctgaaaactataagcattaaaaaacacaaagaagataatagcaacagtaggcaatgttagttattagggaggctgaccctatgctacaagttgtgggttttaagagttttaatcaaaacggtggcaggaatgtacttttaagaaatattctctgcaaaaaaaattctttccataatgttgcatacaccataggtcaaatcctgccattctccaatatcttatcaatatgccttaaaaattctgatctgctgggattagactgttaagtgagtgttggccctgtcattctagtgccaatatcaccaagaggtttgtggaaaaaaaaaacaaaaaaaaacaataaatatttgagagaaatttaaaaggagggaaaggaaagggacaaagaaaatccaatattcaaacctgggtttgagagataaaggagccagttatctgaacaatgagaggatagccttgtccaaattctgacacctatctcagacaaacctacacctgtcccaaagagcagatgtgacagtgatgttggctcagcctaggatgccacaccaggcccaaaaccagtgcatgcaagtggtatcaacaaaaatccccactttcttacctattgtgatgaacaggaacaagagttcagacttctggtaaaccagttagacaaaccaagaagtgcagcagaaaacagtcctctcattgaaagctcatgatttaaaacaacagatttaattctggccactggccctgccatgaaatgcacagatgcttaaaatgttcagagttttaagtggcctttacccttcaataagcactgctttctttcgggctcaaagcattgtttttcatcccctcttcactggcctgtgggaatcagctgggtaatgctaaaaccattgggaaagcccaggatcttacaaaattcagctaaatctggtgaaaggttaaatgttcccttcctagactgtcgaagcagtaggagcagagggtctcaaatttaggagctccctgatcctggctacattgctctgtgagcttgtggttttgtgattactttagcagcagttctgaactacaaaatttttaacgaagcataactctacttcctgaaccaaaggcacctgaataaaccgaagcaagccaattcttgaaatgttgtcaaatttggtggatgtcacatttttccccctagagtagcttcatttgatacccactttaaacaaaggctcgcgactagcagaagtaaacaccagttcaccatgattctctctcatgctctccattctgatgtcagctagagtatttttaagatgtaggcgttcttgtccacacaatttctattcatttggcatagatactgagcaattgtgaaaattaccattatttacattaatcgggatgcagaaaaagtatgtacatctgttcattttcttatctcttaaaatgctcattttatgcatatttggatacagagggtcgcattgttcattccctctcctctccctcctttttcctccccacctttctctgtcttctcttcccttcatgttacactgcagtgtctaaatttaccactagatggcagcaagaattagagcgtgtctggcagagattcgttagcctacgctgagatctgccctaaaacagcaagatgcaaaaccttgaaaacataggggctgtttccaagacctgggcggtgagcaggagggcatttgagaaaatgcctgtatccctgatgacttaaaaatcagtcagatacacacctgtgtggaatgattttggtcagactgtgataaacctgggtaaactggcttcctttcggcttaatgagcccatgatttgatggaacttatgtatccgttcctttgtacctttaattctttttaattatgttaagtttcattatgtataatttcaagtcaaacatatattttattcctatgaacttcagataattttgtgaagaatttttactttgagtctgtttaaattaggattcggcaaatactaaagatttttgtttgaaaaaactacttctactagtatgtttaaataattaagagtagagttttcaaactctgataactgtactgtaagacagatagataggtagatagatagttgatagacagatgaataatctcccagatacttcccgtatatctcaaattcggggattattgcaaaatagctaggattccaaaccaatgtatacaaaagcaacaaaattgaacataaaaaaagttaaagtacacacattcagacttgctgtttttctgaaactgtgtataatttcaatttcactgttctcatagggttctcagtaaaccctgaaatttgaaaataatcagttagctccaaaaatctagaaaaaagagataaaaacatctggctcttaactctctttttaagtgatgttaatattggtatagaggggctgcattcccagtaacagtgtctaggaggttctggaaatctttatggaatgggtcaaggtcagagttttatatattagcaaccagatgagacatgtaatgaaacacatttgaaaacaaggagaaaaaaatggtttagtatgacgatactactagaggaaacagaggttttgtttttatctcagagccttttcctcacaaagtgtcctacaaattcccctctgctaattggaagttgctgccaggctgtgatccccactttccacctcaaggaaactgctaacagtctgtccagagccagcagagttttgctgttttgctcactttgggtttggagccgctatagatgcacagtgaacagcctaacatggaggagtctgtcctttcaagaccttcctgatgaaattccagatcactacttctctccacctgtcagagctccgtgccatgaatggcttctttgaaggaaagcctaagctgatgggactaggtttcttatttttattctttcacatttgtattgatcctgttgctgggaaatgtggtcaatgccgaagaccccaaacttttccccaggcaaggatcttgagtccacctgcatgcctggtgccgaacactggctcccacagcctccacaggctgaccagagacttgcaaatgaatgaagcgatggtagcccttgtaactgataggttgcagggctggaattctggagaagggaactgggacagggcagacaaatttggggtgagcattagccccagaagcctgcatgccagccaaagccaggtcactctaaaaagtgagctctgccctgcacactaggccctggctgtatttaacatccctttgaagtaagcaggggtcagggagtgagctctaagatgtttattctaagagtctcctgtctgatttcctcccaaaaggccacccttgcccttgaacttcaggcctgtgtgtagagaaaacaatcagggttttgaacttccaaatggacgtggaaacctcgatacgaggagacctctaacccaccctgaagaagacacgacccagactcgccttgcaaaagaccaaagccacctcttaactcatggctcatagcacccaatgggggaacgagagggggaattagtagccaggaatcaaggctctccctgacactctccagaagttactcaaagagctccattttttgaaacacacaagcaaataaacttccatccagaaactcagaccctgagagaaagcaaactcagtccaaaaaaaataaaattttgggcaagatagtcttaacattaaaaagaaccagtgctgcaccgatgaggtatttattcaaactaagaaggctcatgaccttgactttaaaaaatgtctcaatctgtgaattagggttggggacattgggaagagcccttttcaagatcaaaggaagttttgttttacttccttgtctgatctttgtcagtgatggtccccaagctaagagacaattgctacacttgtccctgagaatgcagttgagtaataccctatatgctttgaggcccctggccacctttcctccatctctaaaacccgtctgttttccattagacggtcaatatttagcaggccaccactaggtatccaccactatggattttaaaagaagtgtaaagctccatccctgctctcaaggaagtttcagtcccttttggagaaacaagagagatagacatgaaacatttggagaccaatgtgactcaatctgtgatttagtaccatatagatgagtagatcaggaactccccacctgctccaaaaagaggaacagtctctgggttagggaaagtaccgcagggtaaggagagtggaattggggtctgtgttctcctggaccccctcacaccacaccaagcttactcttctggggagaagtctggagaagtcgagtgtggcctaagggtggggctccagagccagcttctttaggtccaaatccttgttctaccaccttttgggaataattgtgtaaacttttctgtgattcagttgttctgtctataaaatgggaattaaaacagtacctaccttaaagagttattgtgaaatttaaatgtattaatgcatacaaagttcttaaaatggaacctcaggccaccagggaatatcagctatgctgttagcttctagccttattatctcttcagggtcattcaacctgtcatcaagcctgggtactcccttattgaaaatgtctctcttttcctttcttttcactcctactgccacccctccccataaggatggaggaagagttaggctgaaaatccttggtttgatgtatgggtctaccaatgcgtagtcacacaaccttagaatgtaaccctgtgcaaaatgagagagttgaaacagagacactccaagaagcttttatattttggtcccttcctcccgccccatgctcccagttctaagaatctttcaattggccattgattaacaatactcggccaggcgtggtggctcatgcctgtaatcacagcactttgggaggccaaggccggcggattaccagaggtcaggagttcgagaccagcctggccaacatggtgaaaccccatctctactaaaaatacaaaaattagccaggagtggtggcacacgcctgtattcccagctactcgggaggctgaagcaggagaattgctggagcccaggagacgaaggttgcagtgagccaaggtcatgccactgcactccagcctggccgacagagcaagactctgtctaaaaaaaaaaaaagtcaccaactgcatcaggtattcactgtttcactgtgtaccagatgcttttctaagcatcccatatatgtattcacccatttcatcctcataaactccgaggtaagtattactatgatctaatttttcagagaagccaactaaggcacagagagatttagtaactggcccatggtcacacggcagtaagtggcaaagccaggatttgaatctaagctattgggcatcagaggctgcactgtaactcctgcgttatattccctccaaggggacagttcctcatccccttgtctcagaagcactggcttctccctctcttcccaattgacacctccattctatgcccataagatgccatccttattcctaattttaggacaggcccatgcctttttgctcctctgcatctatccaaatctccccatccctcatggccagatcacacccttgaaacaccttgttcctgacacaggtccacgtaagcctccatcatccaattcccaggacccacccacccactcctcattggcttccccagcatcctgtagggagatattcactctcaatagagaaaggcaatccctgctgctgctcctcaggagcacggaacatgccactgtgaaggacagccctggctgtggctactctggcaaatgactgctgctgtctctttgaggcacctcagatactccaaagtgaactttccggataccctgtggctgatgaattcagtcaggccagcatcatgcacatactcttcagatatggggaaaacccacccagcttttttcatgaggctcaccaaataaaagaatcatcagaaacttaatttcatttatataaatggataatggatgccagggactagccttatggtccctttctatcctccctcccctcctggactcccacacatgtctaggacagagaaggttattggtatatacttgctggaaggaaagatggaaggggggagggggagaagaaaagaggaaagaaggaaggaagggaggaagggaagaagggagggaggaaggaaggaaggaaatactttgaaatacagagaagaaacagatttaaataaagaatttgaaatgaaaagagagagaactagagtagaagggaaggggaaggaaggaagctagaaggaaaggaagaaacaaaaaaacaaagggaatagtttgaagtgaaggagaagatggaaaaaggaagtcatagaagaaggacgggtgaaagggggggattcagaatgaaagacatattgaagacagcaggaagaacagaacacatcccttggttcccctcatggaccaggcagagtcatcacatcattaatctaaccttcaccgaccactgtaaggcaggccacacactgtgctgaggaagagaaactgtgaatgttgaaaatgcttgtgagcaacaatgcccacacatacctaagagagatggaaaagtgatgggcagggaccaggcccaggctcggaagtgggaatgaatgtgactaatgaaggagggtgaggaggacatgaacctaccccaaagcagaggatctcgattcccaagagctctttccaaatcaccttcatgaggaaggaagacatagcgaagacacctgcctaagtgggattctgagctgtgccgttattctaaagagaaggcatctgatcctttaaagaccccactgctaatgcagaggcctgtcatcagcccattagcttttctgcaggacacttggagagtcccaggccatgagacactgtataggtgggctgatggagggtctctgccacccaactgagcacctgcagatgccagctctgaggccctcaccactgcggcattagattactggagcttcttagggctttcagcaagcttacttgggaccttatatttggcctcaggagtcaggcatacaggtgaaaaatggctcctaccactgaaaaccagcattctggagtggctcagcattccaaagagtgttacacaaaacacaaaattccaatagttctctgctgccaaaggcataaccagagtttatctggtcctaatattctggtttaatttcccacaagcctctactcaaactgtcctttgctgtcctccaaacatgctgcctccattcgtttttgctgtgtaacaaaccacccccaaatttggtgtctaaaaacaccaccatttatttagcttaaaactctgcccatcaacaatgtgggctgggctcagctaaggagttcttttggtctcatctgggcttgcttctgtacaacagtccattgttgagtcagcagggcactgcttggcctggggtagcttcagctggaatggtccttctctgttccacatggttgtcatcctccagcaagctagctcaggcttattcacatagcagctggagagagttctgagaggacaaaagcactcaaggcattttgaggcatagacccagaaccaccacaccatcacctctgccatatattactgaacaaagaaaatcacaaggccagcccagattaatccgccttttgatggaagcaactgcgaagttggattgcaaagatgcatgggtacagacagtgagagaattacagctatttttgtaaacactgctatacatgccttctgctttcttgcttctgttcctttgttcaacttctctcttctgccaccctccctccacgttttcttttcccccttaattatcttcattcttcaaggcctaatcatatctcctcattggaaccttctctaactacttcagctagaaggaccctctctctttcctctgcatcttgcaggcctgttgcatgtcctagtttgcatggactgtgacttattctaccatgcttgttcatgggcacaatcatatgtaatattctcaagggcaaggaccacatcctgtattctttgggcactgaacacaaagtcagtgctcacacatagtaggtactcaacaaatgcttcaggaatcattttttcttcacacatctggttttgccttaaagttcaactccaaacctgcagcatcctgctttgctgtagattctaggtttttgagggagagactatgaaggaaatagaaaaaataaatagtttgatgaaaaccattgaaagttggaccccattcatcttttgagcatgagatcaaatgtcttttgctatgaggatagggatgggactagatgtaattcccaccaccagtgttgagatttatttgccttctttttgggtttcccctctttatttaaggacctcgtggattatttacgggttcactcgcatagtgctgtttatgcttcatccatgagcccaccgatagcagagcaaatcatcagatcactaaaacttatcatgggactggatgggaccactcaaggtaagaggatctgcagagagcacagctcctggacctctctgtctcccttctgcctcattaatctccccgcttctcaaatacacacctttatcttatagaaccctatttgtaaatcaagccatgtgataaatgcacaaaactgccgttagcacaccatacaaaaaccctttgttaaagcaaagaaaactttctaatttacctcattgtgaacagcaaatttcgataattttgtgtgatcaattctgttgaaattaagcaaatattgtttgtgtgcgtgtgtgtgcgcgcacgtgagcgtgcacatgtttgcctgtgcttgcttggggctgtcacttgtgtttccctaagaccaaagtagccaatttaatatccaatttttcaatccttttattttttatagccagaggttggacagtggaaggccaccactggccattgaggatatatagacaaaacacacacaataagcttccagccatttctttgtcagtgggaccagagctaaactgtgctactttgctcaacccaaattaatcctctttttgaaaaattgtttcataaaagcctcttggaactctccctccatcttgcagagatggtttatacagattctaccacatgtcacacaccagaggggatacggtgctgaataaggcagttcttgctgccaggcaaactggtgagcacatttatggaagtagcaatttatcctggccactggactgtacaatctatgtgcctcaccccacctcccagctgacctgaagtcctacattgtttaatgcaatgcttcaagcctgctatttcagtagaagtatggggtactccatcagttttcaatattattaaagcagcagaatattcacatacaaattttgctagaagcctactatataaaacagataagaacaaggctgatctagttaaagtagtgtcttcacttacccccatactgataccccctggggcccttctactgagccctagtgctccccaagacacttgtttgaaagacaagactttttctttttcactaaagcagggtaaaggcctgcaggaggatattttttcctccatatgaaatgcggtgattggctgatctctaggatcccttccaggcttgccttttcggtgttatgactctgcatcctattggttggtctttgtgaaaagaaaacgacagtccagtctaggaagcccttatggtatgagactgaaggtagctgcctgaatctgctcctgtgatactattcactcgtatgtggccttagatgagtgacttatctattcaaccctgagcaagttactcaacttctctgtacttcaattcatccagttatgaagtgagaaaaacaatatttatgagccaaggtttttgtgagaagtaggcaaattaatctgtacaaaatatttaacattgtgtctggagacaagtatcagtaagcattgtataattgcttgctactattatttgctgttgtttctgaggtgatcgacaagtatttgaagcatttctcagagatgctgtaggaagcatccttatgacagaagtgaagtaggactagatgtcctctaagatcctggattagtcaggataagggaggttttgccaccataacaaataaaccctgtagatctcagtggcttaacagaaccaaggtatttcttgtttgcatcacatctaataccaatcagtcaactctctacacagtgcttgtccttgaagacagtgactcaggctgctttcaccttaagggttcatcatctcaacacatggcccccatggttaccaaggtaaaaagaaagagagggtcagcctagaggtgactcttatcaccttgcttacaattattggctaaaactagtcatatggccacacccctgaaaagaggtaggggtaaattaagggatacagacattggataaacaggtaccttttattttggagggggaggaggttcttttttgttttttgggtttttttaaaatttgagacagagtcttgctctgtcacccaggctgaagggcagtgacatgatcttggctcactacaacctccacctcccagactcaagtgattctcctgccttagcctcctgagtagtcaggactacaggtgtgcaccaacaggcatgcaccaccatgcccagctaatttttttttttttttttttttggagacagagtttcgctcttgtcacccaagctggagtacaatggtgcgatctcagctcactgcaacctccgcctcctgggttcaagcaatactcctgcctcagcctcccgagtagctgggattacaggtgtcccccaccatgcctggctatttttgtatttttagtagagatggggtctcgccagattggtctcaaactcctgacctcgggtgatctgcctgcctcggcctcccaaagcactgggattacaggcacgagccaccacacctggccaatttttgtatttgtagtcgagacggggtttcaccacgttggccatgctggtcgggaacacctggcctcaagtgatttgcccaccccaggctcctaaagtgctgggattacaggcgtgagccactgtgcctgtcttaaacaggtatcttttaaccttttaacattgaagcgagatagagtggcatcttttcctccacaagctttctgctgtatgaaaaactgttctggaactactggcttcccacaaagccatattaattctcttcttaaacttcaagtgtttcttaatggaaaatcaattatttgagatttaagcaaaaatgcaagttaactgaattgtctcagaatgactagaattattctttggtcttgttttaaagacaagtgactaggaaaaagttattctagaaattagcttgtgtctcaacaaaaattttcactcatttccggagtcctttggtctatatgtcatccgaatcagttgctttacatgtatgcaactttgcaatcatgtccttccctcctccgattggttcatcacagacaaaacttgctctattgatctgatcacagtggaagatctgcagaaagattacattaaagacatgagcatttgctcctcagtaatcatctgccatcaatttttcttcccctgaggtagtagatatttcccttgcttctctctcttagccttatacctaaagaattctttggttacttttttaacctcagttttaaagcttctcactttactcctcttgtcatcttaagagagaaaaaaaaaacagagaatgctatgtgtatggtctggtttttttagaggcaaaataggagaatgagggagaaatataggacagtttattttcaaagaaacaaaggaaagtagaagaaaaagaaaattgacagaattatcagccaagtttcaggtagttctgcctgacacatcttttgaagcagtgaaagtcatacagtgaatgatcacactggcctcatttgcaacaatggctgctttaaatcaaatgagcaggacaggttaggaatattgcattagctcacccctttctgcagagatagactcactctcagggtaaagttgcccagagctcaaaggatgcactgtttcatgcaagagctgccttacaggatctgagaaagagaagccgggctctgagccttcatcttcagcccactccactacaactgtgattggagcctttcaaggctttgtttcaggttgagtttggggagcagttggccagatctgttccttgatgaatgtcttcactttaatctgcaatgcaaagccatacgcttcaaagaaaggcaagctacaggaataaggtcagtgttcctttgatgccaaggttcaaagatgaaatagcagtcccagtgaaatgacaatgtttatgcacaaacagccaccttcactctgcagccaggctgcttgtggagttaatgcacacaggctgaggggctgcaggccgtgcatgcattccatatgcaccaagacccttttaatctcctggtctgtcactctgaggagtgcagtgagcccaaaagtggagatttgatttctccatcctaatggatgctgggtggtcttccagccaagccaatgttgtaagccccttaagggcaagaaatgtgtcttgaattattctggtgttcctctgagtgtcaaactcagtgctcagcttaataaatatgtcatgactcaacttccctcttgccagcctgctccatttcaggccaatgtttatgctaaataagatcatgaggatgtttatctcataggactgggagctgggaattggttccacaccagttgtggcagcggaagggatcactcagtgattgaagttacttttggaaaggtctagaaagatcgcagctcagtcgttttcttatctagacatagcacacatagcctcaggaaggtgagccccaaaccacaccgactcccctgagaaagcattgtcaaaaatcatcttattactcatgtttaaatcttcgatgtatatttttcaagtaatcaatcaacattttttgaactcccagtcttgatcttaccttactacaccttctttccccaactctgggtaaaattccatttctcagagaagatagagtttgtatgatgtggctaattcacagtgtgctctgcagtggtgcccggcctgacatctgctccatgaatggcaagtcactttccctctcttggccttagttccttcattgcaaattaaaggttgtcagaagaattaagtgatgtgatacagataaggaacttagcatgatgcttgatacacactaaacactcaataaagtcatagtactttcaacacatctgctttattcccttacttctgcaaattttccaatagctttacccaccctggagttctccctttttccccaaactcacatcttcctactctattagcaactcccacacactctacttgacatatattcagaatcaggtcacttctcacacagccaacactctctctatcacctctcacctggattcctggagtagcctcctgaatattctccccacttttgctcttgcctttttatggcttcttctccatgcagaagccaaaattatcttttttaaaaaggagaagaaaaactaactcataccatgtcacttccccactgagaactttctgtcgtcttttcagcttactcagcagagtccagactgtggtcttcacagcttctcaggatgtggtcctccatataccctgccacccctcccctcgctcagcctactacaggcagctggcatccttgcttttcctaaaacacagagagcagctcccacagaagggtctttgcacttgctggtccctctaaaactgctcttctgacctatcggcatagcccactccctccctgccatcccctttctgctgaaaatctgccttattagggaattggccctatcctaaatagcaaatcctcctgtccctctaattctcctcaccttgctttaatttttttttttttttttttttttgacatggagtctcactctgtcacccaggctggagtgcagtggtgccatctcggctcactgcaacctccacctctcgggctcaagtgactcttgtgcctcagcctcctgagtagctgggactacaggaacccaccgccacgcccagctaatttttgtatttttagtagagacagggtttcaccatgttggccgggctgatcttgagctcccgacctcaagtagtccacccacctcggcctcccaaagtactgggattacaggcgtgaggaccgcacccagccgctttaatctttacagcatttatgaatacctgagaaattgtatatgtatctgcttattatctgtttgccctcactaaaaggtaaactccaggagaacaagcactttgcctattttatttattacactgaaaacagtgtctggcaagtataggtttccaaaaatatttattgaaagaattcttctcgctatccctcttacctcagcaaataaacagctctgatctcttttacatctctgtgcttgattctttccctttccatcttctaaagacaccagcctcttttcacaaacttgcacttgttggtttctctcatcctaaaaagactttccttgccccttctttttccaacagccaccgagcctcaacccatccattgcagcagatctcaaaagagtgagctattccgctggcttcccatctacccttctcatgaagtttccagcccctgcagcctgtcccccgcctgtcctctgcctccttgctccatggatcctgctccctctaaagccactcctgtaagcacactcccctgcttctctgccagattaaacttgatctctctgcatcattctctctctttgaaaacagccttcaaagactgtcttcgttgtagagatgctcttctcttctggtttttctcttatttttctatttgttcttcctctcttttctgccaggcctctttccctatcactatttgccctaatcccacactctgttctttttatagttcccgctgcacaagtaccctcacctgtttcctttccaaaacagcttgcggaccctctacccccagagatttctgcatgacatgcttgctgcattctaacaagccccaggtgctgctgctagtccagggaccagcctttgagaatcactgctgcataatgaccctgtagtcactctttccctcccatcagacattaatggcttgtggatttcttgtagatagaaaccattaaatctccataacaggtcgggcatggtggctcacacctgtaatcccagcactttgggaggctgtggtgagtggatcacttgaggtcaggagttcgagaccaacctggccaacaaggcaaaaccccgtctctactaaaaatacaaaaattagctgggcatggtggcacaaacctgtaatcccagctactctggagactgaggcaagagaatcgcttgagcccaggaggcggaggctgcagtgagctgagttaaggggtagcaccagagctgagaggccaaagaagagaccctgagccagcagacgagatatggggtttatttaggggaacttacgtacagggatggtccagtgattgtaggctggacaggagaactgccaccacttgtaaaaagcatgtagttcatgtagcattttcacttaacatcctttccctaacaacccccacctggcaacctttattcaacctttactcagcctttattcaaagggcctcaatcccctgtatgacaagcatcccactggacaagctgggtactcagatgttcctcataggtaaggaatgaatctccaggttggccacgctcaaactgtgaacacacattcaggtgtgtctgccatacagggtcattctcaggaaatgcttaaactgtcacggtcaggtgtacgtaccatgcacaggtgcagctaccatataacaatccacacagttcctgacacatcataggccttcaatacatactttccagttgaattggaaagaaatgtgttaagtctcagttatgtcgtgatgcagatgctcacaaaatatctgtttagggccatcttttcatcaaaagaattgtatctccgaatacttaacatcagcaatctgagtaaataaacttgctcatcaaggacaacttctttcttataattcttgtctgcaggcatgtctaattttactcattatgcctatctgcttatgatagagtcactgatgttggggaaagttcccccgcatgtccccagtcatcatttcatatttcatgatgatgggagtgccagacagaagggagagagtgattacaaggtcatcatacagcagtggttctcaaagagtggtccctggaccaccagcagcaatgttacctggggcttgttagaactgcaacaaagcatttctgaatcagctgttttaaccattcctccaggagattctggtgcaggctcaaatttgataaccatgtttctacgtaacagaaaagaaacagatctgtgcagtgggagaagtaaagtgaacagaggatggaattctggcagatgcaaacaaaggtaaaggacctagcaaaaaaaaagaaaaaaggaggaagaagagcaggcagaagaataagaaaaagcccgaaagagaaaagcatgaaatgtgtttggatccatttctttaaatctgtgtttaaaccaaaacatcaacgctgccctctcagttactactagcaccttgcctgtccttcagtccccatgaccactttggcatcaggaataggaaagggagttttgcttatgaaatgcatgtgcctcacaacagtcactccctaagcctgtgctttcacataactttttgaagtatgtaaagtcattaagagttcatggtcacaacattcattttattgtttgatttgatagtagacatctgacagagatactgccatttctccaataactgctatcccttaggataaatagggtagcatttataataattatttaaattgtctcttcagtgtatcttcaatgggtaggatcaatttgatgaaaggaaatccacaatgggcaacactgctaggtgttgatttatcataggatgactcatgacaaaatattccatattcctaactcagaaagaatggtctctcctataattatgtgggatctacttaactcatgctataacagtcaccctccatttgactgctgatcttcctcccatgatcgttacaattttgatgacatggtgttgaaatgaaattggcacttttttgaaaaaagatgatctgcttaacctgatgcatctagtgaatattagatattaagattcttgttatattttcaatttcatgtcagctgtttcatgaaacagcaactatatatcttaccaagcacttactttgcctactggctactgtgtagtttttagatctacgggcccacttatctgaagatctaaacgtttaaatattttagaatttttgtgtaacattaagtctttcaaaatacaacacttaaccagagacaggaaagttggaacgattctagctatatgaacaggccagtacttaaatttggattactccattgacgagttcatttctaatttcaccaaaatggctataagaaaaatcataatgtctctgacttaatcaattctctctcagctattacctcagtgccaggctggtgggataatcaccaactttctgaatcacaaaaccacattttgtatcacatggatgaaaacgtgattcatttataatcaagtgaccagtaatgtcggaaagggaaacagtaatggaaatttacttacaagagaaaaggtatacagaatttcaattactaatgtgtaatatctgatttcagtagaatacacctgcatcattgttaataacacctaaacttaaatgataaatttaggaaaaatgaaattctctatttttcttcaaagtcacacatgtccctctctgcccttaaactgaaggagtttctgggtggtaaggcaggggaggggacaatgtgtctggaagaaaaggaaggagaaaactaaagataaaattaagatggaataatgacttgtgttcttcctggaaaacaatagctatttaagatcctcagaaatagaggaatttggccaggtgtggtggctcacacctgtaattccagcactttgcgaggccaaggcaggtggatcacccgagctcagaaattcgagaccagcctgggcaacatggcaaaaccctgtctctaccaaaacatacaaaaaaattagatggcggtggtggcagacacctgtggtcccagctactcgggaggaagtggtgggaggatcacttgaccctaggaggcagaagttgcagtgagattaaatcgaaccactgcactccagcctgggcaacagagtgagacctcatctaaaaacatatatatatatataatatacatataaaaattatatacatgtatatataaataaaagttatatattatatacttatatagtatataaataaaagttatatatatttatatataatatataaataaaagttatatatataatatatagggagagaggaatttggcaggaagaaataacaatgcaatattttctctttttaatgttatgttttctcaatatagtattcagggattattgctgcaaaaaaggtcataaatagttactctgttactattatccttctttaattatcttagatattatcaattaaacagatactatccagataactacttcaattctctactttccataggaagaaaaagcttaacaagcctatcatagaatggaaatccaggttttgatgagcttttttaagaaagccaataagagaaggatggggaaattgagtctgcaaattagagctaagtcccccaatcattgtgctggtacaagaagttcctcttcaatctgggcttcctttaccctttaaaaactaattgctatcagaccaagacctgaggaggaaatattcaatagaaatgctccctagcagagggcctcctcacaataaatctttctgaggttttagttcttggatgagttgggaagtactcaaagctttccatctgtggggaagttgttgccttggctgtagaattctacttgcacgttacacactgcctttagcagggttggggaatgaaggctttcagctaatgggatgctcctcttttcctttgggttttggcctctgggagaaggctctccattcttgaactgcagaagtgatggattttttattcatatttggttaaattatggtgttataatatatatattaatatatttggctatatagtgttatattttatgatgatattccctattctaaaattaaaactgagtgttctgttccttcattgtgaagtccctgtttctgctgagaacatcagagaggctaaagatgacaatttggtttctatgccctgggaaagaaagcatatattctgttcattgaagtagttcagatcatgtttaaaaacatagataagtaaacagctgttgctgattaaattgttcttatcctcacaaacgaagggaatctctctacaaaattaaagaaagcaatccaggccttccgtgatttcccagagacttgcagactgggcaacagctaatcctctcatatttccctcatatttgccccttcaccacacagaccttcctggctcctgactccaaacataggtccccctgagctttctgctactcaagctcatctcccagaacaggtgcagagccaaaacttgagacaaaggaaatctggactcagaacagcttggggattcaggctggagtgacccttctagttcttgccaccaacccagggagaccttccctaaacatcctttctaaaatattgtcccctttcctgtgagttactcagtccacccccacagtcagtatcattttcttcatagcacttattacctccttgaatatgaattttctttctgggttgatacctgtttttgccaggagaatacaagtgccatgagggcagagacactgtccccaaactgaagtagtacatgttggctgaataaatgacccattcagcatcagctttggccacatctcctcaactattctgcaggcagcttttcctctatctggaaggctctcatccctccccacaatacactacccccattcattatctcctgagcccctggccatccttctaagccctatcttgatggccccagtcagaaaattattcttccttccttcagtcccttgcggtttttacttctattatgttagtcacacacacccctaacccagccctccaaataggtagtgattagttatttaattgcaccttaagcatcaaatacgtgagtgaatgggcaccgaacactatacttgggactaagcagattttctgacaagcttgggatctagtcaccatttataaacaattagaatgttatttctttggaggttacttatagaattattttagttcaaatactgctgtcataactacttcatggatgggtgcatgcataggtcaaactctatagcctctttcccattcttttgataaatgcatggttttatataacatacactagggatttgtctagacaccatcagatatggaggtgagctgagcatgctggataattcaagccaatgctacttaaatagcagaagcaaaaatggagtttttcctttaattatcaagcagttagttgaatctctcacttaaagtttcctataggagacacaatctgaaactcaaaagtgtatttgactttttcatacacagtaatcagcaggcactgggcaacagctaatcctctctatccaagttgagtacatttctaaaatagaggagggtagcgtgattcttaagcatccaaaatgacattttccatcctccctccttctcctcctccatcttaataatgatttgcacttaggatgtttttcaatcaagaaactatgtttttgtgacattacttggtgactagtaacaagaggttgagaaactaaaactcccacagaaaaatttgggtttctttttacagacaatgaaagataaaggggtattgggattttgagtctttgaaaattttccatagtatccttctttgtggggttggtattagttaagttatgttacttgttgtaacagacaaatgccaacaaaactgtggcttaacacaatagaaattcattttttcctaacataaagtccaaaattggtgtttctgttgggcaagacagttctcttccaagaacccagcctccttccattttgtagctcctccagcttcaatgtacggtttccaaagttgctgacaaaggggtaagaagcatgaaggattgtgcctttttcaggcacattttcaagggccatggctggaaaggcacattgcatttctgcccacattccattgtttgtaactcagtcacatgactttgcctaaccacaaaggaacctgggtaatggagttaactatgtgcctaggagaggaaatgagtttggtgagtaagaaccagactttgccacagtacttaacctccacccaggacattctttcctccgactttctgattctttccaaatgctctcctattttcttcataaataaactcttgacccggaatagaataaaagtatctaagaacaaaagaaaaataaagtctaaaggactgaatatggatctctcctccttttttagggactctcgggtctactagtctggcttttaccacaactacttctagtttctttttcacagaactcattcctagcacatggcaggtgttgctatcattgctgtgattctgttgctcagttcccaaagctgtgtactttctggaagcagaaaatagaccctgaagataataattcctcagaagaaattaaaatgacataaaattggagtagctctggaagtcatgccagaggaggggagaatgtatattttggaaatagtagcatacagacattaaggactttttttctttgaagaggggatgtgatgagacagaaaatggcatcattatcagaaaattaaaaattgcaatttaaaaacatgaactgattaggctaattctttgaattgaatgagtttgagtgcaccccagtcactcactcagctctccttgggtacttttgggaccatagacgaaaaggaagctaataaatttgaacaggcagcaaacctctgatgttcatcacattggcacccagcccttgagtaactaaggtaaccaggcacgagactgaattctgagcccaggtagagaaataaaactagagacttcctatcaggatggagctaatattagaatatgattccgattaacatcacttgcattttatctacttttgaaagccctaaaatctgtttgcttctgttatgtctagatgggcaagttcacaccagataattcattctacagcatatctacaggattaaaaaaacagctctaaagcttaaatttctattttttattcagttattaggagaaaaaagttgattaaaatgtcaaggtcttttaagtaactattaatttttgaatttcaatcatttttatttaccttctgcagagaaaagataaaggaaaaaagagtgacacttataatgtatgtgcactgaaaatacaaccatgcctctttgttaaatcactttgtgcgaattatttcatttactctgattatttgtgaaattttatcatgagattgccaggtgaggtactgaccctgcctctaacccaatgtggactgggagaaagtggcaccagccccttccagctgtgacctacaacctttgctctggtccctgcaacaaggcacacatatttttacacttgagtttgataggtttaaaaaaaacagggactaagtgggaagatttagggcattgaggggggaaagaaaggagtacactgggtgatagaaattagctcttaagagaggaattttctctttcctactgtttatttttgacatgagatacattcacaaacttctctcataagacattgattgtcttcagtgcaaactgttgggagctgcaagctacactatccattcacatcctcaaacttatcttgtggctgttattgcagatttactcctcactcaaattctgtctcttctctagggaagagggaatgaaaagcaaagaggaaaaggactgtggtgcgggtgataaaaccatgataattcacacttggtttaaaaaaaatcttctcacatttctcagtgtctaccttggaagagtgttcactgaatacaaaactggtttcctacagccttttttctctccatccaactcagccaggacatggtgtttgctccatttttctaaggtccctcaatgaaaacaagaggcatctacaaaaaattccgcccaaaatgtactgtctgagggccccggcattcaaggcccttggcattgttgacagaggagctagcttctgatttctaaatacatttgccacttggttgccagctggagagaccgaaagaggctgagggcatggagagctgcattttctaaatggtttcaggcccctggcatttcagcaataggtaatacaaaacagatgttggtgctatgctccactggctttcaactgagggcctgcctcagtccatgattaatcacctgtgctggggggcaaaaaagttctacctggtctttttgtgtgtgtggacctaaggtcagggttagcaatcaaggtgacagacattgcctctctgccttgctgttgctgcttacctacatgtgtgacaacttgggtttgtccaataaatgcaaaattagccaacaaactgaactctagttaagagggaaagtttgcctggttgtgcagaaatagctagcaaactgttccagaaccttctgccccttcatttactttatccaaagagttagccaagggtagacttttatgaaagctcagtaaattctgcagttgatttgagtctttaaaaaatttccctagaaagaatgtaaagagaatctgtgtgtcttttagatggcactggggcaaaagatagtgcagccacttccttccagccgtcccacaaacaagatatccttttacatgagccctactggagcatcctcttcacatttgcttcctctgtgtggttggaccctgagatgggggagtggtgatgtaatacatatggaattccatgttggttcagtacaagtgggaaaggaaagaacattattccatctgtagcatcttccagggtaaaggggaactggtattccacactggcctttgtttttccttcctacagctggggaggattaggcaggtggatttgtgcctgaggaatcccagtgtgtgggtctgggctagagagattgtatttgctttctatttctacattacgaattaccacaaacttagtgaccattgaatatatcagtttccttgggtcaggagtctgggcacagtgtattctctgctcaggttctcataatgctgaaatcaaggtgtcagcagctgctgttttatctggagctcaggcacctcctccaagctcacatggctgtgccagaatccagtcttttggggctgtaggactgagatcccatttcctctctggctgtcaatgggaacactctcagcttctggtggctgtttccgtctcatgagggcccctccatcttcaaagccagcaacggagagtctccctcacatcaaataccccgcctctctctctctctttgaatctcttttaaaacttcagagatgttcacctgtagctaagacctaatcagggctctcttaattaggacttcattactggtgaacatctctgaagttttgtgccctttgtaaaataggaggactttatgtagttaaattctctgtgatcatctgcttcaacttgagcactgagaatgaaattattctgataaacatgtaattcttaaaaataggaatatatggaggacatgtcttgggcaccaaaaagaccaagaaggagaccgggatggccaggttggctgtaggtgccgcaggtcagttatgtagacaagagggacccagttttagagagcaaatccaagtcagtgagtccagtctttggttcaaattaatagttttcaatatttgtgaaccatagaatttttcaaataaatgtgtatgaaagtatatatatatattctgtagcactcaagttatgtcagacaccctactaactgcttaatatttaatcctcataacagtatgcagtgggcattattattattatccttgtcatgattcccattttacaatgaagaatccaggtctcagaaagaggaagtaccttgcccaagatggtagagtttactttgaacccagcaaattggcttcatactgtttgagtgcttggctgagaagtcattgtcctgggcacaaggcaaaagtctggggggcttccccatcaatttttccccataccctcctccctgaggcctgttcagtgcatcctaccctagcaaagctctggaaaccaaaaggttttaattctgcaggcagctgccttggatggggcttcctggtggccaccttcatttgcacggtttctcagagccctttcaaggaaccacattaacacaattactcagcctagtatctgtcttttgccaattcctttgtcttcttgccacaaattggaacagttgtcgacacagctcctcgcccatttcagacatttgctgccaccttggcttcctgactagtcttgctacctccagcttttccctcatcctgatccatgcactatacactatgagctttgtcttcctaaccccctcagagcatgtcatgtttacttacaatgcttccagggctctctaatacccatcaaaaaattgtgactctcaaggtggcatttttagcttatgatgatctaactctactgatctttcccatgactggaatccaaacattctaggcaagtactcatccctttcctccccatccccaaacttgtgtccacaagatgttaagttaccatctctaggtctccttcaaactctcagagcacttcttttattgggcacttgattttctatcttgttgtgattaatttttctagtttataagacccttgaaaatagtggacacactgatattttaatcttccactgaacacaacagccacttacaaataataggtactaagtaagtagatgctgaatcaatcatcctcccagaagtcctgagaaatagatgtagtagctattactatcatccccatttaacagatcagtaaattgaggctcagagatgatgagtgacttgctcatctctatagatatagaggcagatagaacctaacgcacaaatctattgactgaggacaaaaatttcttgaggctgaattattctctggtgtcttcagttattatcaatcattatttttagagaatcaacaaacactatataatttgttactttcagcagtggttcttaactggaggtacacaccacagttacccagtgagtttttctgaaaggtccaacctagtccttctggagcagaatgtctgcagagggaggtctactatgtgtgtgtgtgtgtatatatatatacacagatttttttgagacggagtctcgctctgtcgcccaggctggagtgcagtggcgcaatcttggctcactgcaagctccgcctcccaggttcacaccattctcctgcctcagcctcccaagtagctgggactacaggcacccgccaccacgcccagctaatttttttgtatttttagtagacacagggtttcaccatgttagccaggatggtcttgagctcctgaccttgtgatccacctgcctcagcctcccaaagtgctgggattacaggtgtgagccaccgcacctggcctactatgtgtattcttgaaaaaaaaattctagaaaccctgatgtgtttctctggttaagaatcactgattttgaggcaagagaaagaaataaagggcacccaaataggaagagaggaagtcaaactatctctgcagacaacatgattatatatatctagaaaaccccatagtactggccccaaagcccctcagctgataaacgacttcagcaaagttgcaggaaacaaaatcaatgtactaaaatcactagcatttctatacaccaacaacagcaaaactgagagccaaattagaaaagaatcccattcacaattgccacaaaaagaataaaataccttggaatagagctaaccagagaggtgaaagatctctacaatgaaaattacaaaacactgttcaaagaaaccagagaagacacaaacaaatggaaaaatattccatgttcatggataggaagaatcaacatcattaaaatggctatactgcccaaagcaatttacagattcagttctatgcccatcaaactaccaatgacattctttacaaaactagaaaaaaaaagattttaaaattcatatggaaccaaaaaagagcacaaatagccaaggcaatcctaagtaaaaagaacaaagctggaggcatcatgttacccaacttcacactatactacaaggctacagcaaccaaaacagcatgatactggtaagaaaacaggcacatagaccaatggaacagaatagagtgctcagaaataagactgcatatcttcaaccatctgatcttcaacaaacttgacaaaaacaagtaatggggaaaggactccctatttaataaataatcagcatcatttattaaatagggacaaatataaataattctgccataaagccacatgcatgcgaatgttccttgcagcactattcacaatagcaaagacatggaatcaacctaaatccttatcaatgacagactgaataaagaaaatttggtacatatacaccatggaatactatgcagccataagaaagaacaagatcatgtcttttgcaggaacatggatggagctggaggctattctccttagcaaactaacacaggaacataaaaccaaataccacatgttcttacttataggtgggaggtaaatgataagaacttatgaacacaaagaaggaaacaacagacactgggatctgcttgagggaggagggtgggaggagggagaggagcagaagagagaactattgtactgggcttaacacctggctgatgagataatatgtacaacaaacccccacgacacgtgtttacctatgtaacaaatcttcacatgtaccccgaaacctaaaattaaaattaaaaaaaagaatcactgatttacaagggttcccagaaggccctcagcttcccatattagctcatttaatgtgtaaaattacataattaatggcttgctaaaatattactctctatttaaatgcaaagtaatattatatcttatcattcattttataagtattcaggaagcaataatactatgcaaatgtctacatctgtctcatggcacctatttttggttatatattatttgatatctgccttgcctcctgttagatcatttgttccaaacagtgtcagaaatttttcatcttctattgccacctcagcagctggccttgctcctgtacatagtgagtacttttcatttgtgaagtgtataactccgtgaatgatggaattcacgcctcatcatgagcgagtttaccagtttttccaaagagccaactttgataatctcctaggcactgccaatttccaggtcagctgcgtaatgccttcatgatctccaagcctctgtttcctcatctgtgaagtgggcccaaaaagccagttcctggctcacagtaggtgcacaagaaatgtccattctcatccttgcttggggattaaatagctaacagtgtatctgagcagctggtgggaggtggaggcagggtgttttcccagagccctcgaaatcaggccatgccgacggctgcccacccctgatgtccagcctgctcctgcgtgcattccacaggggcaagactgagcagcctggagagcccttggaacatgtgtatgtgactataaaacatgctgtagccctggaatcccgacatcaaaagggagagcttcagtgcctgataaaaatgtgcattcctcttagcaaaccactccaaatgttcttttctccaccccactgggaagcttgtcagtgctaatgtgattcttatgattcttgctgctctgtagcctcttgatctttaccgagatctctctgcccctgagtgtgttggaaacaaaatgtcctgtctagtgttcagtgcttaaaataacagacgctggcttcctgctgtccattgaaactttactccaaggtctctccccatcaccctctgcccccttgccaagccaggggaaaaagtccagggtaaactggcagatagagaagcagggaggggcaggggaaattaggcattcttagaccactgcaggcattctttaatatcaatttgattttccctgggttaatttttcagaaatatcaacttcttgagatgtgagaaatgttttatggaatgtgacttcccatctctaaagacaaggacctcattttccaagcaatgctgcctaggagcatgtatgaggtcatgcagtctgtattctggacagtggtcatatgctaaataattgaaggagggaatgagctgggtatatttctgaacatatattttcaagcctgggaaatagtaaaataagtcatcccatggtatctgggcatattcatgttttctgttagaaaacgagattgcaaagtctgcagaaaatagaccatgacaatggtattggctcacaaactcacaaactcgtcaaccccatctcttttgcttaggattacgggggaaatgcattctctttttttgcatgccaatggtttaacagagaagaaattttccttctttaagacaggtcattctggtagtttcagccatctgtaattccttctgggcctctgggagactgagttgtcctaaacatatttttggaaatgccactgatcattgtttttattaggcaactgcaaagctttgtagtaagaggatttgtgttttatttgtttttcttcccctgacccagctggttttgttttaacagcattggaggggaggttaaagtatttgtggcctccgttaacctagcctgtctctcaaagccagcaaagccagaaatcagaagagatagaacaggaacagacaggtcatcagccaagataggtacacccttgatttaaccaccctcaggggtggggtcgacagggaggttgatcttaagatgagtgaaagcttcggagcatgtagctgtcgggagagcaggtcacccccacgaaaaggtatctcaggaacctgagcactcaggaactgctgggaagtaatcatgccaaacaagaggctaccacatatgcccatttttatttgccacacccagtgaaggagcatagctcagccaggctgcaatcagatacccagaaaaggccatgcatggccctaggggtggaccagaaatggcagctatttctgagacatcccagtctgcttggctgaaccttgttaaaaccaaaacttatgccaggtcccatccccagagatcctgatttaatgggtctggggtgcagcctggacataaggtttgccaagctctccagatgactgtgaggtggcactgaggctgcagagaactattgcccagcagaaaatggcaattcccctttcaacgacctactaaatgccagatgcagtagtaaacacttttcccacattaatttcttgatttctcccaattttcctgtaagataagcttatctctaatttacagctaaaactgagatttttagatttttaggctgttcaggtggagtttgattcccattccacttaactccaaagcctattccttttccactcaacagcctcctcagagaatccaaaatatgacaaaataaatacttacggaaactctccagagggctacataagagattatttcattcacttatttatgtgagtagggactttccctgacttctgtgtaatatgtagaagaaagatcagaaactacttaattggagactctgagtgtcttgaaggggatgtggccgcagtgcccaatctccaaagcttccctttgccatcctagcatggctgtccctgtacaaaaggacatgcaccaaatattgcttctgcttttgcaaatcactcttcaagcaagaatctcaaagcccaacataattaataaaatcatttgcatcctgtttagatgagtagcgttttataggtacaaattccacctctgtccccaggccttccaagagtatgagaatgttttcaattttaaagaatgagcaatagagtaattgaaaggagctgtatcttggcaaacgcaaaagacctcaaaggcatttgtagtaacctatatgagaaagcgtggcaaccacaaagtgtgtcataatggcttgtcagccatgctgtgctaaatggtttaaagataggaaagatagggaagaataaaacatttagttcttaggagtcagatacccctggatatcatctgtttggtcaagtctctgaaggatctggaagcagggaaatggtgacattagctgatgatccagtttcttgggttaatcaaggaagtagggacagccggggccaattaagtagctaggcagccaatgatagatgaatctttataggcaagcgcaaagataatgccgttgggaaaagcaattgaagtcattcaggcacttccaggccaggaaatcctcctagtcttcaagggggaacatgtaggaatcatcaggaccagcctgatgaagtcatctgttcattgtgtagctaatgatccgcaaaagtgctgaatgcacacggggacaggccatatggaatacattttggtggctgagatgtatctgtgtgccttgatttccatcacctttaaaataatccttaccatagccctcttttcctttccttctgtccacaatctccccctactctttatgttcttaactctctaaacacagtttcaatgtatgggtgatttttcttaagtaaggcaaatattctccttcttaatttctagttctgcacttccaataggctctgtaaacatacaagtttccaagggacacatcagcatgttataaaattccttttgtttttttagcacaaaggagactgtgtctaagcatatatatatacacagatgtttctacacatctctggattccttacttgtgttcacattgcagatttagaattggggattttgaaaggaatatgaactaagaaaccatacttggaactgcctatctctttctttaaaaccagagttccatccagggactccaaagtaaaggttttcaatgagttgtcatgttgataaaaccaaggaacactattctatgtccggctttgttttctccctctctggttgctgctattttgtctccctttcagattcatcctactcctactccttccaatcattaaatgtgggattcttcaattcctgtagtctcacctcattttttcttttttagacaatccattcatctttccagcctcatcttgtcccagcttcaaccacatcttgccttgttcacaacttctgtgttcttccacaaatcacaagaccattgcacctgtttcctaagcctggaatactctcctctagctttttgtgtggttagtacttgcttatccttcggatctttgttcattcatcatttattgatttttttcagatttggtccagtctccctcttatgagctctcataacaccagataacatttctctacactgtgcatcccagttgcaattttacatccatttgtgtgattattttattaatgtctgtttctctcactagactataagctcttctgtttttatatcttactgttcctattgttactgactcaccttgcactgcccacctctcttctttataggttgccacagcttctaccaaccaatggcttactctgtctcacagattctgctaataagctttttttctgtgtctttcaatttctactcttactaccaactaaagtttactaccatcctctctaaatttttcacatccacactctaatatcaagaagatctggtttgtttaatttatatttattgtctctttttcaaagctcctatgatagaccagtgtatggcttccttgctaacacccaagtggactgcctttgggtcaagggcatgctccattcattgtctgtggtcaggatagaggggctgagatgtcagcatccctaagaaagaacaataagccggatgctctctccatcacaacctgcctgctgggagctggcagagttggggagggatcatccttgagaactggagttgggaaaaagaaagtaacagaaaacaagcatggacaattggggcatttagcatcctcctccttggtctgtgttccactcaactaaatctccatttctctgcatataccatattgttaacacaattaaggtgtcacagaagtgaagttcatttaggcctgatgagcaaaggaaaacttaaaggaatatttgaagtattttgggagtgatagagcctagtgaaaaaatgttagatgtctgggtaaagaaagtgccctttgggtgcttgtctacacctggttcaccttcactccttggacacagcccttcaggacctctacctaaagtgaagggggccctagactccaacctagcgatatcctatgctagtgataccttacctaaccgctcacaacatgaggctgtcaaacacttgctcagccttcaactctcaactgcctctactaaaaaaaaaagatataatcataatccaaacagctggcagaaatgagagttttattgatcttcagaagaaccaatgaccaccatcccttacctgggtagagcattatagtggaggggctaacaacacagattctggaatctaggattctagaatccaattctggcttggccacctaccaactatgtaaatttgtgtaagttacttggcttctccttgcgtataacataggattacagttcttacactaatttggttgttgtgatgactaaatcaataaatgtcaagagcttataacagtggtgacattacatatgggtgagctataattattgtcgttattactattgtcctttagaggctacctgatccaattagtagccaccacctgaattactcatgacacatttggttataagaggcagaagaggaaatgtattggctgacacagcagggacgtccaaaaaaatggtctggcacagctggacccaaaggttcagatgatccatcaggactctcagtgtcctgcgcagtggcttctatgtgagtcaatatcattctcaagcaggcttcctccaggttaggacaaagatgtagcttgataattatcccatgcttagacttcttcctcagtggatctaaaagaaagactcaaatagtccctagttgtgctccatcatcaaaccaataatcagggggatgaattattccaactgattaagactggccctcataccaccttgtagaaaagaggaagggcagggccaaccctactcaaacagtatggttctctggaggaggatgctgaacacaagatgccccctgttcaaccctttgaaaaggcacaatctggggccatttctctaagaagggaccagatgactatgattgacatgtttactgaaatgtttaccctatttccatctgaagagttacaaacacccatgagtgatgttcaaaatattgtataacctctagagcagaatctctgaccagttcgtctgaacatctcaccactcagaatggaggtctgctaaagacaaccaataagacgaaagactgtagtggcacattcctgccgaacagcaatcctgcatcaaatgcaaactttgggctgatttctaggggacttcaatgtttaatcctattcattcttattgagcaaacactatctagctttggctggcttacttacccacctgttttgaagcaggacccgagtagacaggcatcttcaggatgggactttctgctctttcatcactttttcatctcacatgcgtgaactctgcactgggacacacacttaggacacaggctataagagctgaagcaccaataaccttgacatggacccatgtatgtactttgcttgtctttctgttctgggccaatgttgtccttttttctggcttgggaaagcaggggtccccctctttcctcccttctattagtctaccaccaaatgcctcaaaaaacagccctaatctcagcaggacttatctttgtctatgaatatgctatccctacaaattcagattggatgaaggatcctttgattagagatttaaatgagggacaatttaatgagccaattcagcttagctaaaaagcatctaccaatatctgctatgaagtgtggggggtgggggaagtggttatgttccttcttatcacactcccttctcttgagttgatgtttttaaggtactttgcacagagtctatacaaaatagatacctcccctgcctcccaccagccctctagcgtatcctggcttcagttgcttgcagcacctcgtagaaccctccacctcccttcctgccttccaggtgcaaggtagtacctgggcatcagtgcccacacctgctccccaggagatatctcccttccctacttcctcctcccagctagtgctgctggcctgcagaaagacttaaagatgcttgccaagttgaccggacctttacttccctctttctagtgggaattgatggatttcacgcctgtctcttttcagggctgcagagagtacagcaacttgcgaaaaacacaagatacttcagacaaagactgcaggaaatgggattcattatctatggcaatgagaatgcttctgttgttcctctgcttctttatatgcctggtaaagtagcgtaagtatccaaggcatctcataatcacacctaaaccccaaggtgacctaagatggctttttggcacaggcgttagattatgcatctggaatggggtgagtgagttcagaattcactcgtacggcttctcggaagccacctgtcactctatcagctagacccttcccacaggtcttatagaaagggaaccaaaggtgctgagactgagctctctccctaaattcaagttctgtgaatttagggaaatcacttatctccctcagcctcacctgtaaattaagcacaatcctgagcctccttctgacccaagatcgttctcagggagaacttctgaagatcatctctccccatattaccataaaaacaatgtgatcaggctctgtgctttctcccattgaactctgcagccgtcctcagaagaggacattctcatttcaagcgtggggaagctgaggctgagagcagttaagcaacctgcccaaagtcacacaagtcaaacagcagtaaaactaagatgcaaaaacccaaactgaggctcacattgaagctcatgctcagtttctcatgcccttactgtgaacctgtttgggggttgtttacttgattgcaactttgaaacagcattagcaacaactgcataaagaggaaaacatgactttttgtcagtttggcagggacaattttatacatgagcccttctccaacctgctggagactaatgtaattatactaattacatgttgttaaaaggaagttaactggcagggcacagtggctcatgcctgtaatcccagcactttgggaggctgaggcaggtggatcacctgaggtcaggagttcgagaccagcctggccaacatggtgagaccctgtctctactaaaaatacaaaaattaggtgggcatggtggtgcatgcctgtagtcctagctactagggaggccgaggcaggaggatcacttgacaccaggaggcagaggttgcatgagcagagattgtgccactgcactccagcctaggtgactgggtgacagaatgagaccctgtcaaaaaaaaaaaggaagttaactaagctcctttctcaaggtaaaatgtttatttttatctctgaccaagcacatgatagaaattcatattcaacatactacgcatcagattctagaggtcctaactcccctccaatgtaacccattgctggaactttctgtttgactctctaatagcctgactagattggcagagtacttgaagtattgaaaagtaccaataaaagaggtttgggtcttacttgtgaaaactcatggagggcaagactgagttataagttcctaaaagacagattcttcagagtatgctcttgggtcattttaccacagcaaaatcacaagcagttaaaacacacatgaaggctgggcgcggtggctcatgcctgtaatcccatcactttgggaggcccaggcaggcagatcatgaggtcaggagatcgaaaccatcctggccaacatggtgaaaccccgtgtctacaaaaaatacaaaaaactagccgggcgtggtggtgggtgcctgtagtcccagctactcgggaggctgaggcaggaaagtggcatgaacctgggaggtggagcttgcagtgagccgagattgcaccactgcactctagccagggcaacagagcaagactccgtctaaaaaaataataataataataagttttttagcatgccacatcattcccaccagttggccctttgttcacagatctgggtcaggaaaacattgcatgaagtatctgaggacataatgtgctacagacatgttatatatcatactgctctgtgataatgttaaggagggttgacaacagtgattgaaagtagcagacaattcaaagatctttaaccatctgatttttgaagacacatacaaacacacacacacacacagacacacatacatttattcaaaatgattggggaaatgatgtgtgttggaagaaatattccaaacttggctcaggtttatctaatattttatcattagctcaaaagaaggcactgaaaataaacttgtccaaggtataaaacacataattctggagtgttacaatgacagtagggagtgttctggatagttccaactttaataataaaagccagaagtagaatcccaacaggttggaaaaatgaaccaacccaatgagaagagtccgtaagtagtgaaaacaaatgcatgtaacttcaagaattcacacaatatgctatgaacgatatgcttcatataaaagttatgctctatggtgtgatgaaaggtttggaatcaaaaagaaatttgattcttcctcttcctagctggggattcttggacaagttactcagctttctgaagctccagttttctcatttataaaacgggatatgatagtatcttatttcataaggttactgtgaagattaaacaaaatgatgtccatacagcatttggcatgttacctcttatataagagctattcagtgttagctttcattattaatagcatcaattaataaagtcattaataatgtcatttttagtaatgtgtacaaagcacttaatatagtagttggcatgccataagcattcaatcagtggtagccatttcactactactctgcaacaatgatgatcattatcagtttcaactgagcgcaaggttgaatcaccacggttgcatggctctccaaaataattattacaatttttggttgcattactcaaaataaaatgtccagaaaaaatagtaggtaaagatcctgctacactctgcttccatattgctatattagatgctggataatatgtcaaacaatcttgtttctttcaacttaagattgttttttaagaagagctaatatcacagagtactaaatatatgctaagtaaggctattagacctcagcgattacccacggagggtaggatgtttagccctagtttataaatgaagatgctaagacttagaaaggtcaaattactttctaaagccgggtacggtagctcatgcctgtaatcccaacactttaggaggctgaggcagatggatcacctgaggtcaggagtttgaaaccagcctggccaaccctgtttctactaaaagtacaaaaaaaaaaaaaattagctgggcatggtggcaggcacctgtactctcagctacttgggagattgaggcaggataatcgctggaacccgggaggtggaggttgcagtgagccaagatcataccactgcactccagcctgggcaacaagagtgaaactccatgtcaaaaaaaaaattactctctaagactcacacaggttgtaggcagcagagcccagaattcaaagccagttccatttgcttcataaactagagctcttttgaacacacagcacaacctctcaagctttagtccataggaaaaaaatgcacatctcattaaagcaacacagagtctaattatttttaatgtcatcattggtgattcaaaaggcaacaatcactacaaacagaaaaaaaaaaaatctgggtcacctaaggaaacagaacaggttagttacaaaaggtaatattatctattacaggtaggagttgctggcaagagtttgccctgctgtctggctgtgtttccttctgtgatatttctttgttggaagtttatatgtagagacattttttgaaatagggcgttaattgtataagccactgtggaagcacttcttccatttggtcatttaaaaacctttgattttattaaagaatggtgatctctccacatttcctactatgcagaatgaaaatatagtctgtagccagttatccttttgaacaaagccttgttataactctaccactggaatcttctatagagctgtgcaatgtggttttacccataaaacatacacttaaacaatcaagaatatattgtatttggtacttggtaaagggtttgcattttttcccctgttcatgtaatacacttggaagatggtgttatacaagaggtagtgattctgcatacaatgcaatgctaatgtttattatcattattattatttcacaaagtttagtttcttttagcctattgccaattgctttggggagtacaaacacagaggctcattatataaaatttccagtgcaatcatatatattaacttaagaacactagctttagtagtgtaaggtttaaattcaaaaatgctccagggagacgccaggttagactaatgaatcaacagagtcatatattttgccctgcattctttggcaaaacgtgcttcctttggcacaaagagaaacatgcagacagtgaaagcggtcttctgggagtcctgaaaactggcctgagatcatgggtcaggtggtttgtactctagcaataaaagcacttgacttgtttctcagacaattatgagctctcattctgtgcagttccgtgggcagccttccatagggtgatcaagaaagagaaagaacagcctctgttttcaagctttctcagctagaaagcttcatctccttctaaccttcctagttgaaatcaaagggctaatgttgcctcgcccaagccagggagccagagaggctgtgtgtcttgtgggtcctgcagtctccattgcttcatctgataacctatgttctatctgaaacaaccaaaaggcagactgctcaacagcaaaacaagtgaatggaagagcaggcttattctccacgtctggttcaagaattcttcctgagctgtgattggaatgtttctctggtgctgtcagcttccagcctaaaataatacaccagcaatctcttaatgctaagaacagatctgaggcatttacctcacttatgggtaaagtcactcagtagttaagttttcctgcaaagactaacagagcccaaaggggaaaaagagtcacttgggagtacatgcctttttgtctgaccttggctctcagcacaagatatttacagcctttgagcttgatattctagaattgttacagagattagctctggaaaagaaatagactagaaggataaagggaaggaatcatagcttatgaaggttttactctgcatcagaccgctttctagttctatgacttaacgtcctataggctgtaaggttctctgcgtgaacacttctttcctggcctcctttctgccccattcctcttaaactcagttgctgagtttattatccctgtgcatccctgggcatgttcattcacatatgaaacaatcaggagaccttgctatttcttatctctgatttgatggaaaatataatctttggcgctgcagtgggaatattggcttggggttggatactacagaccctctgatcttggtcttcaaattatactcattaagtataggctcattgaaatttccacattgtattattggtattaagtttataaaacatataggtttacaattaatatagattctttctttatggaattgcattataggaactatttggtttttatacctagggaccctgcagatggattttatatcactgcagatttgttaaaccagagtcataaacatcagcattttctgcttggtgtcaaagactcaatatccacaattatctaatgagtgtgtcagacccataataccacacacacaccatcatgagtggcaccaagtgactgactgcctgtttatttgtcaattttatttgacagaagtttaaaaacttcaatcatcttccacttattatcataaaaaagaaaaaagaaaaaagaaaaaatcaattagccatattccttttttgtcaggataattttgtcttttcccaactaaccactttttttttttctttttttgcttttccttaagggcttttgcaaggcatatgctagagaaaaaaattggagtggtggtcgtgggatttccagccactcccctcgcagaagctcgggctcggttttgtgtttcagcggcacatacccgggagatgttagacacggtgagtacaccacaggccaacgggatctcagtaccagtaccttggattcaaagcaagtccttttgttgagacagcttggggttctctgggtttctcttgggttatttaggaaaacaacactgacaaaagtcactgccaaaaaacaagagctcgtcaacaacagccaacactgtgaccactcagtagatagaaatgaaaatcagtttagtgaagatttcaatcagtgttttggtttcctacaaaagactgactgagtagccaaatgttcttctatttacttgatcttaaatgcaaaagctggtctaaaatgctgttttagacttaattacatgcatcctgacatttttcatagccactaaatctgccataataaaatatgacccaactaagcaacatgttggaaaaccaacaagaacaaatctacattacagcagcacctaagtgaggtggaaatgattttaaaattgccttttattgtccctcgatttccattgttatgtgaatgagtaatatcagagaactaagccatctactcagtttggagttaatgggaagagtcacataacataaatgcagttttgcaaacactattgagagtcaactatgtgcaaacttggggcaaaaagtctaggagaagatgctaataaacaagcaacacatataataccagacagaatgaatgaatcttgaagaagaaatatagaaaactgtgggatcatgaaggtggggtgaattattagagtggagaagattcacaggggaggtggcttttgagccaggcctttttaataaagcttatcgagcatcattcaagacttccaatcagtggagtgacacaatcatgtcattatgaaataaacgtgacaaatgaactggagaggaaaggggcaaaaggaaaggatctaagatgtagctatttaaacaaaacaagagatgacaaggctaatggtagtggaaacaaaagaaactaatccatgaacaaatattacaaatgaatggaactgccatgacttgacaaatgattggatgtggtgcatatgtgggaagagagaatcaaagacaatttgaggtctttagccctgatgaatagaaggatggtgaagcacttaaatgagataaggtatacagtaaggaacagcaaattttcaatgggagtgggggaatagaatgagctcagtcctagacatgttgagactatgtgtccatggtccacctatagaagaaaaataaggttctagagcttaggagagtatgcaaagctggaactgctatagtttagggaactgagggatccttacagccaacagtagaagatgtaattgtccagatatgagcaagagtgaacagggcagactcctggggagtgcctacattccagggtagatacaggaatcgcaggtggggacccagacttacatggaactagagcagtcaggaaagacatgttcagtgtagtattaaactccatacagaggagaaagtttcaagaaggaggagggtcaaaatgcccctcaaaactgcaggaagtttaaatgcagtgagtgatgagaagaaactattggattagcaattagtaggaacttgatgttccatagagtaggcattttaagggaatgaagggaacagaaataataaaaaaataaaagagtaaagaggataacttgagtttgaaattatacacgtacacatgtgcacacacacgcacacacacacagagttgccatgtccttcgtcttcaccagtatagcctcaaaacataaaccattgtattgtacacagtaggtacacagtacaaattattgagtagcatgttaacaactgagctaaccagattttgagatgagtgaactttgttttctttacacccttctatatttcccagattctctaaaatgagtatgtatttccagaatgtgaattttaacaaattgtttcttttaaatgaaatgagttggtgttaagaaaagacaggcaaaactttcaagaagtctgactgtagaaagaaaaataggtttagaaaatacccttgaaaatgtagaaggcttgagcatgtttacacattaagggaagaagacagtgaagaggggaccttgcacagaagggagagaagagagcatggccgggaagcaagttccctgagatggcaggagggacacacagcatggatgaatttgtaattttgtgctccaagcagcactgaggtattcatgtatgtgattctcttcacaacttcttaattgctgcaaaacacctgctttgaaaggatactgagacatcagtcatctagacaaatgcctctaaactgttgagatcatgtgcccatctcaacagaaaattttgagcagttccttaatgtacatgtaagagaaaatggaaaatgaccctgatgaacagccagtacattaaggtagcaattgaacctaaaggctcatagactagaaataatattagacaaatgcactctgcgaccacatttggacaagacagagacaaggccacaatacttaatgtctccctcttctgactgacatgtgtgacagttgctcattcaccaataacaactctagcctcgctttcattctctcgcctttcagatagaaattataaatatatagccagccagtgaactgctcccacttcttaacagcatccaacccagaactggtccctgcttccttagagtcatctcaggcacaagctcaaatgcagtgagaagccactcccatcttcctgtcactaagatgcccacggttcttctgcagtgtcctccctctcccatctcagcaagctaaagaaacctaactctgagcacgagtgtgttctgggtggtcttggatcagcagacattaacataaattctttataaatgatctatgcaataccaatatattacgtacattatataagagacacacaaataaaagtttaaaaggttgagataaaaatgaatagaggtcgggcgcagtggctcacgcctataatcccagcactttgggaggttgaggtgggcggatgacctgaggtcaggagttcgagaccagcctggccaacatggtgaaaccccatctctactaaaaatacaaaaattagccaggcgtagtagcatgtgcctgtaatcccagctactcgaactgctgaggcaggagaatcacttgaacccgggaggcggaggttgcagtgagccgagatcatgccactgcactccagcctgggcaacagagtgagacgctgtctcaaaaaaaaaaaaaaaaaaaaaaatagaaatcctaatgttttcctcctgcatcctccataaattatctcacagatgccccaaatgtgcagatccttcactttggataccactgaactagtccatcccccaccttcagcaaagattgctagaaactatcccagagaggtgtcattttaaagataactttggttactttttcttagtactgagatttgatgtaggaaatttagaaaaacagggaagaacattttaaatactcatactcctaccaccaagaaatcaattactgttaacaagttggaggaaatcttaattaatgtcagtttgaaagatttcccaaagaggaaagtccataagatctattagtcacccattctaacattaacaaccctcaccttaccttttcaaagcattagaccctaatattatcttcctcctcatttggcaggttaagaaaaacaggctcagaaaggttaaaaaggcatgaccaataccacaggattggtgatatactagaattgaaaatgaccttttttttattttattattaatatactttaagttttagggtacatgtgcacaacgtgcaggtttgttacatatgtatacatgtgccatgttggtgtgctgcacccattaactcgtcatttagcattaggtatatctcctaatgctatccctccccactccccccatcccacaacagtccctggtgtgtgatgttccccttcctgtgtccatgtgttctcagaaaatgacctttttttacttcctggatctcatttgtttcatgtgcaaaatgggggatacatgtacccacctaaagtaagagagttgaaacagacaagttctcagtccctgtgagttaagttctagtattttctgggacacagagatgagtatttaaaagcaggaggcctggggtagcatgagaggacagaggatgatgttaatcagctcccgcaacattcctctttgttcttggccaggtgatttgctgtgtcatgaagatataacttcaaatgcattctgcaaccttatctttttcttccacaagactacatataagtcactacattttaaaataaaaccttttaagggtaagcatgggtcacatgtttttattcttctcttcacactctcaaaataaaataaacattcatagtatggagttagaccactaaataaaattaattagcatctaacattcctctagggtcttaaaccacaacctaatggtacggatcttgcttcttttctttaaaatcaaagaagctagcaaactaagactgtgtgtctttgtgaggcttgctattaatctgggctctgcaaagcagggctacttaggtgttcaatgatagctattggaaagcaatctcattgcaggttttagaagctcttgatgaaatgggtgatctcttgcaactgaaatattcccggcacaagaagtcagcacgtcctgagctctatgatgagacgagctttgaactcgaagattaagtttcctggtcctgaatgacacataaagactttgcgagaaagacctccctccttgcctcacaaggaatataaatggatttctcccccttcctcaggacaattttggttcccagaccagcttgattgaactgagggagacgttgttgtttttaatgtctccagcttggactgcagagacaaaaacatgattccagatttaagtctctcttcttccaagtattctactagaaatacacacacacacacacacacacttctgagaatatttttaatggcaataagcctgtgttttagctgctactgtgcagaccctttcagggattccaaccaaatgcaaatgagagaatttaaaatttttattcagtaagttcactatgtgtttacttattccatctgcagatgtaagtgagtgtggtggacagtagccaccttccttgttccactcataaaagcatcagctagatctcatctgtatcatgggaagttccaggcaggagggtaaagaaatgttgtttctaccatttgtcacatttggacgtttttcacagacaagtgtcaaaagacatagttaatgtttcgagggggaaagcagaactgatcaactgcgactagagacgtctttgaaggaaattttccttttcctcttgctggtctcctacagttttacagctgagcttttgaggtttggaaaattcaagatgtttgtttcataagaaaaggggcagaaagcaagcacaagacacttttaggtctagactaaaatggtagttacaacaatttgaaccttgttggtgcagtgcacggtgaatgcttaccctgcacagcctctattaccttaaggaattagttgtcattttcctattgaattttgagtaaatggtgaaattcagtgtcctttagaatcgactcccaagactatatttgaagaatgcattgattcaagaaggacatttaaaagcaaattctgactttttcaagaccaacacacttgtttaggcctattaaattgtactatcacttgttacatgccctctgaattgggagaaagtgggcttgcacactttgaggtaactaactgtaatttacttgtgttctctctttcttgctctccttctcaacatgaacacaaacctctatggaaaagtagcctcttgttaatctgatctagtttgtatggaaaaagcccatggagaaccttatctttaacaagctcccagagggtgcccagatttggaaattctagagagcagtggtgaccttttagcaaagcttctgtaacagttcgaatgagttgcagaacattccactccatcaaatgacactgtaaacaaatcacttcaagagaggcttggttttgtgtggcacagatggacccaagctttcatgctgtgcactgagatagaaactccacccgcagcgcctgcgatggatggagcagtgtgccctgatgctcaaagcgtattaaaggaaaaaaagtgatcagcatggaaagtttttatggggaaattataactccaagtgggtgcattggtttaaaaatggatcacaatgatagagttcttcatgaatgtttacaagttgtaaggaataccgttagtgaaagaggaaaagaagtgggttctgaaaatgcagtttcccatccaatgattttgataacaaaattccaacttttctcaatgaaactgatgcagtattatttgtgcaaataaaatgtgtcataaatatgcaaagaaagggagacatactgttcttatcttgaatatgtgcatttaaatgaattgtccaaaatgcataaatgccttgcgttctataaaggaaacaggaggtcaaaaagacagcgagatatctagtccttccacaaggtatggaaagcaataaacatcttcctttctttctggatctgtctgtgatgtttacacacaccttcacatctacacttcaagttttaagcccctagacatgtgtcttcatgagcaggaatgtccactattattactttcatggaggatattgggtctaattcattgtgggaaactacttacctacccagcatggaaggcagggaggaagttagtctcttttcatcaagattcaagagtacaggggcaatttattacactgcaatgtacaaaacaaaaggacctgtttctgttagagagtccatgttgaatatacaggtatgagaacaactgttgatatacaggtataatccaagtagaatgcttccacagtgcattagaaggtgcccaagctccacagggccaataatattagagtatatgtcatatagaataaggttaattaggagggtgattgtgaataatgagatttttaatttttttaagaaaaagctctcaaatgctaggctaataagttcatgattttaattcatgattttaattcatgattaaaattatttgattattgagtcttgataattatatcatcaaccattaccctctacatcaccgccccgaccttagctctaattatatcagagccaaaaatgtgtctttggttagatctgttggaaaagagaattttctataatgttatgcgcactcagcccttctgttcacatttacacacatgcacacacacatacacatatgcatttttcctttacggagtaagcaactatgaaaatctggttggttgagaaataaatggaagatgttcttgaaaatgacctcaggaaagcagaagataaaggttccagatgatatttgtaaggaggctatctctgtataataaggaaatggcatagacttattcctaatctcattatgaaacgatggtgtcatggacgtttaaccatattgcctttcagcatgctttgattttacagagacgacaggctttggaatttactaggaagctggctaaaatccatacccctaggccctacaccagacctttactgaaacataatagttgtagtgcccaggaatctacatttttaaccagccttcctgcgtgattctaatctatgccaaaatttaagaacattattcaaactctaatttgataaaccaattgactctaatagcaggaaccttgttctgattctcttgttcataattaagtgtatatatactggtaaaattaatttattccacagtcaaccttctcttctcattgggacattttgttcccattttccaagtaacttctctttctacaaaaattgatccaatattgaagaaccatctgcgattcatttgggtaaaattatgccttcttcagttttctgtatcattccctataagatgcccatttgctttgaatgtggtatctttcttttctttctttctttttttttttttttttgagacagagttttgttcttcttgttgcccaggctatagtgcaatggcaagatctcggctcattgcaacctccacctcccgggttcaagcgattctcctgcctcagcctcctgaggagctgagtttacaggcatgtgccaccaagcatggctaattttctatttttagtagagacaaggtttttccctgttggtcaggctggtctcgaactcctgaccttaggtgatcctcccacctcggcctcccaaagtgctgggattacaggcgtgagccaccgtgcccggcctgaatgtagtatctttcttctgttttcttttcctgctctttaaaaaacaaccttcaacctctgattatttattccaacaacagctcttcagtagggtaaaagtcttaacagttcttcaaacgaacaatattcttttgtatttttcttcagagatagcaaatgttataaatggcctactctgatttaaaaacctaagttccgatgatgatgaaacattaactcttaaatatacattttgatttatagcaataataacaattgtaacaacagcaattaagaacagcatctggtgaattcttggcaatgtttcctggtctcaaaacagtaagaacaatttgaagtctgttctttagaatgccctactcagctgcataatgtttagaaaattaaagagtctgtattttaaatatttttaggtaattattgcgggacattgtcttatggtgtcctgatgtacgtggggtgtgcatgtgtgtgtgtgtgtgtgtgcatgtgtctttgtgtgtgtgagaaggacagagagaaatgtatgtttcactgaaacatttgaaacgaccaatttcactttattgtgcctgtaaaatgttagttttaaaataaataaaaataatatgaaaataattgatggttttctgttgatttagtttaggttaccctgaaaaaagactgaggtagagatttgtatttaggaattccactgggaaaattggtaggggtggctggagctggcttgcactgtgataagaactaattgtgcacatttctttctaattcctcattcagtgacatcagattggtagcttgaaattggccacaatgggagtatttacaccatggaaattggcagacactacaagtcagggctctagagagctgtctgttaaacatttactagcacaccactgagaccacctacaatggtacaatacaaacgtaagagtaaaggaacaggattggaaagaggaagaatttgaactatgatgttatcatagcaaaggcctcagccaattccatggaaactgggcaactgagatggtcctttagggtcaagtcaaaatgacaaggatgccagatgcaagctatcagtagaggtgtggggccaggcattaccttgggcaggtctgttgagctgacaacaatgcctgggaagggactcagctgtgatttattattttttaaatgatttctaattgatccattttttttaaagttttatatcagaaaatgttaaacatacgtaaaatcgaatagtataatgagcccacatgcacctattacccagcttcaaacattaccaatttatggccagtcttttcttctattccccaacccatttcactccctctctcaccagattgctttgaagcacatcccagaaatcatattatcagtaaacattttactgagtatctctaaaaggaaggggtgtcttaatttattcttcttttcaacctcattaaaagataagtcttcaggataacaaaggcatcaaaaggagtcaaatgttaaccttttctttccctattgtatagcctgcatgtaaattccctggattaaaactagaaattatttctaaagtcaatacgtggtgtcttgaaggacaataaagcaatcatttttagacacttaccacatgccagacacgatattaagaactgcaacattatcttccaagtactcttgtagagattaataatggcttcatcttggaaggcaagtatattcaagttatgaggggattaacagtgcataaagaggacttccaagactttgatggtagattgttttttcttagaatgtttatcctcttccttatcaaatcaattttcttaaaaagttattttagctaaacgttatatattagcaggagtaattcaatcaagaataagggaacaagtgaaaccagtttcatttggaaaaggttgattcccatgccaatctgggtttaatgtagggactggttattctaattttcattgcatcctgtggtccaaatgggaggctgaattctgacatttgcaagtcaactgctctgagaagttatcacagatacaaaccaataaaatatccaacaacagaagttcagaataggagcaaaaggagactttgttttgctgtggcatataacagcgctcccttttattcagcccagctgctaatttttatatcaaaagtattgattgaaggggctagtggttttggccctcacccaagtttattcaagatctttcttaattaggtttgggtcggctgcagtgcccatggccagggataggtctggctccaatcatcacatcgtgctcttacttcattatgggccaagaactaaggcaaggaaatggctgctgctttgtttctccagcccaaatgtgtggggttttttcccagatctgaagcatgcgtggactaaaggcataaggaagaccaaaggatgtgtaatggcttcgctgtgatgaaatcaatctaccctacaacttaactatgaccccagcatgaataaggctctgtgtgtgaaaagtgaatgggtagcaatgtggggtcatggaaaatgctcctggcatcatttgaataaaaacttttcaacaggctgatgcagccaatcagtctatcagtttttttgcccttttaagggcaaaataatctctgccaacaatacatgatttccccttaatgtgtctgttttgtaaataattgtggttgtcatacaactatttttatagtgtccatctcaattttatataatttacaccagtcttttaaaaaaacgttatacatgtaaagcttcaattaatcatagccacaaattataagcacctgtaacaaaataggtttctttcatatataaaaatgtgttaatattttaaaatgaaattcagttccctctaaaatattttcaacaaaatatccatgaagagtttttaactctaaaaaaattatcaaataaaacttcaaaatatagatttttaagcgatgtattaatgagacaattctaagtgggaccaatcaaagttaaagatttcctatatagatgaggctataactgctatatacagtcaatgtaacaggtacataatatagaaaaatgaaaatattttattaaagtgggtccatttctagtaagatgaaaactaacattttcaaaagttacactgattatttgagcatctattgtttctaatagcgaattagagaggaagtatgactggtattgacatcagtcaacatggctctcgattgtgaatagaaatagaaagccagagattaccagttatttgatgaaaaccagcaataccaaagtgggtagccaaggagaaaaaaatgagaaatatcttactgactgaaacagacaattcctggaaaagttaactttttaaaagttctaattatgatctttgtaggtcaacctgattgtataaagaaattacatccacaaaacaagaataggctgatatgtaaaggaacccagagtttataaaaattaaaaatatgtaatattaaagtggtgaaaatcaatagaaagcaaagaagaaaaaatctttgaatctcagaatataaagcaaaggccagaaaaaaatagaaaacatgagaaaaaatgtaaaacgacaaagaggatacatacaggaggaacaatatccatctaataaaaacttgagaaagcattataatccctgaggctgaaacaaaatggaagatgaaaatggactagcaagtgctaagcggatgaatataaaaagatttttatctaaatacaccttcataaaatttttactatcccaaggataaagggaagaacttaaaattgttttcagctagaaaaaaaattttcacctaaaaaggtaaaagtaattgcttttactactgaatattataaacatggaaagttcataccaattttcacatctgttaacagtgtataagttatccatttctccaatctgcaccaatactattattatttttataacatttgtcaatcttataggataaaaaggggttctctttcataaatgatgtccatttatagtgatttcttttcatatatatatactggctgcttgtatttgtcttttgcacatttgtttgaatcccctgctactatttctattgtaaatacctcatcagcaataccagatactagaagacaacaaagcactgccttcagaattcatagggaaaatacttttgaatctaaaatcctatgtccagaaaagtctgtctaataaagggagagtaaaacggggatttttttaaatgaaagattcagaaagtttacttcagtacccttcctttaaaaaattacttgatgaatacttcaataaacacttccaagtaaaagaaagacatagtatccaggaaagagtgaaattaatataatagtataatgaaaagaaattttggaatgataattaaggtagattaaatcaaaaggtgatgggtaattttttgctcaagtcccactgggtgtccctggttgccaagcaatctcctccacatggtgtttcagggacccaggctatttccagcctgtggctccaccaacccctaggactttgccattgcatgtgtggttatggctccaggtttcagcctggggaaaagaaaaagtgatcatggaagagggctccctttaccctgtatgatgattgacttaactctgactctttagacacattgagagtgctggcaagccctatttccaagatctcaggggagcatccagagatctataaaaagcagaattgctgcagagaatgccctaatatcttagttcctagagatgtaaccctcctatcccaaagctgctccaacaccaacttcatttactcacatcagacagatgaaatcttataagcttcatccattctccagctacagaacccagagtcatgaccacacagccagttggtcagcaggttagaccagttacttcttgcgtcatgtctcattcttatcaagtatggatgcactcacctagttcctcaggaaagatatgcttacttctgttcacagtgtacaaggtggctgtaagatgtgaatgctctcagcaaaggcacctttgaaatggatgggctaggctggaggagggggcgttacagcagtggttgtccatctgctgtcctggccacaagaaccatgggcatgctaagtctggcccatatgctcctcaggatatgaaaacagaggtgataggtttctcacctctgtgatctttgctctgcctctcacattgtcacacctcacttcaagaccctcctgggtttcattagtgatggtgaaagtgagccaactggggattggtgtaggtttgtttggaattgcctcttttaaaatttcactttcacagggtaatagcctggagtcaactctttggtgaaatgctggaaaagaaaaaatatggtgcactttatggcttgtttatccatctgcaccttccctgatgcatgttcctggagtctctgccttcctgggttgtgacctttcagaattttgtagcttgttcaaagctattcttctgtgacagtttaaggactagaagagagagccactaaaaataacagtgtgcacaacaattcattcctgccccatccccagtgccgttcttcatttccacgtccagccttcaatgtgtatatatgtgaatgatgtgaaaatgaaatttacatatggtaggttctcaccttgtagaagtacgaatttacaggtctgattttagaaaattattgttcatcacatcccatgggcatgttcaggtcttttaaatttatacttctgaagttcatgattaaatagatgttatacattaaagaagaaaagttcaaaatgagagagaggcaacttgaacatacatttagttaaccaaagcttaaaaaataatttgaaaattgtcttaggctcattataatgatcttgaattatactcttaagatattccaggcagggtgtggtggcgcatgcctgtaattccagcactttgggaggctgaggtggatagatcgcttgagcccaggagttcaagaccagcctgggcaacgtggtaaaaccccatatctacaaaaaatttaaaaaattagccaggcatagtggcatgcgcctctagtttcagttcctcagaagactgaggcggtagaatcacttgagcctgggaagtcgaagctgcagtgagccgtaatgcagccactgtactccagcctgggtgacagagtgaaaccttgtcacgaaaaaaaaaaaaaagagatattccatagaagatgaacttctttcattacgtctcaaattttcatctacaagatgcattaaaaatgtacaggtctctttgatatggtttggctgtgtccctacccaaatatcaccttaaactgtaataatccccacatgtcatgggcagggtcaggtggagataattgaatcatgggggcagtacccccatatggttctcatagtagtgaataagtctcacgagatctaatggttttataaatgcaaattcccctgcataagctgtcttgcctgccgccgtgtaatatgtgactttgctcttcattcgctttctgccatgattataaggcctccccagtcatgtggaactgtgagtcaattatactctttcctttataaattacccagtctcaggtatgtctttattagaagtgtgagaacagactaatacactcctaaacttgcaattctacctctgagaatttacactagagaaatacttaagaactttagtttctggaaacatgatgatctcaccagaaatcctctcattgcaaagtggaaatactggataaaatgtaagattctttaaatgtaggactgagcccacaagaaaggaaaatccccagggataaaatatgaagaggaacctgaaatcataagctgtaatagctaagctgaaattctggaggtcttatgggtattttctggtcttagtaacagaggtttttccctctttgttccagtttccttcccacatagggaaaaaagatgaagacttaggcaacaaagataaagacttaggccagtgagaggtgggaagttagactacaaaaatccacccaaaggcatagagcaatgacaaagaagcttttctgtctaggctctagatgaaaaaaaaattgaagtactctgagaaatcataaccacaggcctgacctcacgagtttggcacttagatttacactagaattttcatgggaagagattaacttaaacatgttctgtgctggtaatatccattgtgtacctggcagaagccattagaaaatatctctgaaaggtcatattcttccactgggttccccactgagattctacagaagatgagcttagatccaaaattataaaatgcatggggaacaaatgcactatgagaaacagtagtagaagtagatcccagaaaccataacaatagatatcctctgatagacatgagaaaacatcatgtgttaatgattaaagatataaagaatgaactgaaaatataggaaaagatgagactggtttggaaaacagaacttttagaaatgtcaaaatataataattaatagtaaaaatcaatagatgggttaaacaggaacttagactcaccttaagagaaaattagtgaaccatataaaagaaaattattgagaatgcagtctaaagaaataaggagataggaaatatataggagagtttaactgtacataagatcaggtcatctgcaaacaggaaaatttgacttcctcctttcccatttggatgccctttatttctttctctggcctcattactgtggttaagacttccagaactgtgttgaataagagtggtgagagtgggcatctttgccttcttccagttccattcagtaagatgttagctggatttgtcatatgtggcctttattatgttgaggtttccatacctaatttattaagagtgtatatcatgaaggattgttgaattttatcaaaagctttttctgcatctatcaaggtgatcatatgattttgtccttcagtctatttatgtgatgtacaatgtttattgaattgcatatgctgaaccatctttgcattcctgggatacatttcacttgatcatggtgtatttttttttgatctgttgttggattcagttagctagtattatgttaaggatttttgcatctatgttcagagatattgtcctgtagcttttttgttgtgtccttgtctgattttgatatcagggttttatagaaaaatctaggctctaccagaaaactcttagaactgataaacaaattcaataaaattgcaggatacaaaattaatatacaaaaatcagtagtgtttctgtatatgaacaacaaactagctgaaaagaaattaataagtttatcccacgtacaatcgctaccaaaaacaatagaataccaagaaataagtttaaccaaggaggtaaaggacctctataaggaaaactacaaaacaatgatgagagaaattgggctgggcacgatggctcatgcctgtaatcccagcactttgggaggctgaggcaggtgaatcacttgaggtcaggaatttgagaccaggctggccaacatggtgaaaccccatctctgctaaaaatagaaaaagttagccatgcatggtggcacacacctgtaatcccagctactggggaggctgaggcaggagaatcgcttgaacccaggaggcagagattgaagtgagctgagatcatgccactgcactccagcctgggtgacagagtgagactctgtctcaaaaagaaaaaaaaaaggaaagaaattgaaggggatacaaatagacatcccatgctcatggattggaagaattaatattgttaaaatgaacatactactcaaaggaatctacagagtcaatgcaatctctatcaaaacactagacatttttcaaagaaacagaaaaaaaattctaaaatctgtatggaaccatagaagatcccaaatagtgaaaacaatcctgagcaaaaagaacaaagctagaagtatcacactgccagacatcaaaatatactacaaagctgtagtaaccaaaacatcatggtgctggcataaaaacagacacatagaccaatgaaatagaaaggagaacccagatattaatccatatatctacagccaactgatttttgatgaagatgccaagaacactatttagggaaaggactgtctcttcaataaatggtgctgggaaaactggatatccatatgcagaagaataaaattagacccccacctctcattgtataaaaaaatcaattcagaattaatgaaagacctaaatgtaaacctgaaacaacaaaactgctagaagaaaacatagcagaaatgcttcaggacattggtctggggaaagattttatgtataagtcctcaaaagcacaggcaacaaaagaaaacataggactgaatcaaactaaaaagcttccacacaacaaagaaaacaatcaacagagtgagaggacaacctatagaatgggagaatatatttgcaaactacttacctgacagagaattaatatccagaatatacaaggaactcagacatttcaacaacaacaacaacaaaaacaatgtaaaaatgggcaaatgatctgagcagacatttctcaaaagacatacatacaaagggtcaacaaatacatgaaaaaaatgctcagcatcacttatcatcagggaaacgcaaataaaaaccacagtgaggtaatatctcaccccagttaagatgactgttatcaaaaaaacagaaaataacaaatgctggcaaggatataaagaaaagggaactcttacagactgttcgtgggaatgtaaactggtacagccactatgaacaacagtgtgaaggttccccaaaaaacctcaaatagaactaacataaaaggaatcccactactaggtatatatccaaaagaaggtaaatcattatacggaagagacatatgcactcccatgtttatttcagcactactcgcaatagccaaaataggtgatctacctaggtatccaacaacagatgaatgaagaaaatgtggtatatatacacaatggaatattactcaaccatcaaaaagaatgaaatcctgtcatttggggcaacatagagggaactcaaggacattatgttaagtgaaataagccaggaacagaaagttaaacaccacgtgttctcactcatatatggaagctaaaaaaaaaaaaaaagttgatcttatagaagtaaaaagtaaaacaaaagataccagaggcttgtaaaggtaggggaaagggaggaatggggagagacttattgaaggatacaaaattacagctagatacaaaattacagctagataggagaaataggttctagtgttctataccactgtaggatgactatagttaataataatacatcatttcaaacagctagaaggaggattctgaatgtccccaacacaaagaaatgatatgtatttaagatgatgaatatgctagttaccctaatttgattactatactttatatgtatccaaacatcactatgtaccccatgaatatgtacaattatttttgtcaactaaaaaaataaaattaaaaacaaggaaactgtgaaggagtttaagaatgaattgaggatactacaaagattgagcaacagggataacaacattgtttccgaaatctaaatgttggaaataatgtaaccacttacaaatagaatttttgtttaattttagtatttttataatttttatttgacaagtttaattaactcaaggtaaatacctgtaaaaatgtatctattgacattgagagtataaatttgtaagcctaaatatttaaaacatgtattcgtataaatgcataggaaaatatctttaaaaaactatactagattttctttggataagtagaattatgtgcgtgtgtgtgtgtgtgtgtgtgtgtgtgtgtgtgtataatcttccagaattagaaaataaacaatttggagaaaaaataccaacatactggaataactcagaacatcactcttggattaataattcattcttgtttaatgcctttatttgaagtccccactgctgggtactggaccctgaagataatggtcaagactgcttagaggtttgtggctttgtattccaagacaaaagtgtgagaggcctcttgagagtcctcctgacccatgcagagtgaacctggatctcagacatggagtgcccgtcacacagggtcaatatctggattttacagaaacacctggccttatcctccacagctgtttaccccggagagtctgctccattcagagagctgtccactctggagagtctccagatacggtttttaggacacccagcttccgtgaggataatgagagagctagaccccatgtcattctgtaggatgaatctgttgatttcccccaataccacccactcaccaagcccctcccatactggagagtttgtagtctatggacacagcgttggccattctgtattcagaataaacagcctgcccttctctgaagtcatcactcatccagactgtaggttggcctccccacctcattctgaatcctgattctaggggtcaacagtcattcatgaggacctggacactcataagagaaaaatctagtaatgatttcaagaataaattctgccttggactgtaagcttcctgcttcaggaatcatgacactctattgcaaaagcaattacatatcacaagatacaaacactgtcaatatgctattaacaccacatttccaaactggagtaatttcatacaccccagccagacaataacacttagctttgattaaatgcctgtaacctaccaagccctattctaggtacctaagcaacacagttgcggcacaaaagccatgttctgaggtcttctttagcttccccatcatgtccaccagcgcttgcaaaattaatattttcttaatcttctgggcaaaaattaagggcaaaatactgcccagcttctgctttcccttcccttcagactgctgtctcctctaagttctcccaatatagaaagtctagagcagccactgaacatttgttaatttgtttgcttcttaccatcatttttgagtctggcatagctcttcaatgttaaagatgaggaagtagactaagagggaaaagtaacattggaatacaaaggcataaatcgccaggccgtgagaaactgttcagtctgtcctatcccaaggactaagctctccctactctcctaaactgcctccctacacaaatacttaatgagtaacaaatgtgtcaggagataatagggaaggaagataaaagccacttctgtccctacctgtgagatgctcatgttctggcaaatgaacccaatgatctggttaaaagatcaagtgtttatggaaggccagctgagttcacagcaagatttaataaaaagagtcatgacatccttgggcttactttattctctgcatgctggtgtcttcttagagcagatgctcatatcctcttagcccaccttggaggttacctgtaggttagtgaacaaacactctgacagctccctatcccaagcacctgcatccctctggttaaagattctctcttgactcaggagtccctggttcacataggcaggagtggatgtctcaggagcaactctctcccatgagccattggaactggcagataagcaccttggcctctttgccaccaggggtgataatctgaaagtatgttctgcacagcatctcagaatgtccttagcaagatagtgctccagctgcccacaggggcaacaggctcatcaatgaaccctttacggcagtctttccttccctggcccccttttccactctctcatcatgcttctggaatctcctcccacgtaaactcctggcacccaaatccttgtccctgggtctgattttaggtgagcccaagcaagaagacagctcttttcttttcacccacaaacatctaatcttgaggtctatggtcttataggagtcacgagagcttgctcagtaactatgataaagttataaccttctctaaggaaccaaatattgacctttccactggaatgtcttgacaaagaaactactgactatatggaaagtgtccggtgtcttttaaacgtgatgacgatgagacatattacccacttgctctgatgtggtggtaaaatgcaagatcagaggtcaagtagacctagattaaaaccccagctccacctctttttagatgagttgcctcagaggagttactcaatatctctgagacgcagttccttcatctgtaaaatcagatcttaaattttaccttataatgacttaatgtgttaagaaatgtaaaatatcaagcacattaccaggcatagtgtatgtgctcaataatgtgaagtagtatagaattcagagattgcaaacacaaaaacctaagtagtaaggataaaagagaagccagctgagtgctacattaggctgtagtgggaattgtggcaaagagattaattcaagctctttccaaaagcattaaagttcacatttaaagcccacatcaaccaaacaaaataccccatgagccagatctcacctgtgggcttccctctttgtgacttctgttaggaaaccagactaagccctgccttttcacatgctgtttcttcttcttaaaatattccgtctttccttcattgcctgtcaaactcctattcatcttaaaaatccccacttccatgtaatcaaatatatagatatgcttccacttttctttacaagagtaatttcaccattctccaggctcctacctggcatgtagtaattaatgcattgcatttcattatctgctctcatatattttattatcattgtatttagttatctgctgtcacatatttcatcatctgctctctgatatagtgttagatgcacagttgcaactgacctgattatttccatgaggggtaaccagccactgtcctacatcctctgtttttactcttctgtcatcccaatttctatcctggaataccctcaacctcctcatgatccagaagccttaggaccctcctcctgcccaagctgctatatattatgattggtgaaatccaatgccaatcaattgttaaacatgtaaaatttcttcctgattctctccacatcttccatgagcttcttaaaggcaaagaccttattctcttccccttttattcacagcaccaagaacagtccctaacccacagcagaaattaataaatgaatgagtgaaggaacaaataaataattcaaacaagtagcgaattatctttcttaggcatttagcactcagtgtttcatatcagtgatttacatgacgataaagtagacatcgattgacaacagttcatttaaggaatttgattcttctttcaaaatatttcatctgaggaacatagcaaaatagctaaaaatctccacgatccctgtatccaagttcatatggactgtaactttgccactgttcctaacaagatgtggagtttatttctccatcctttgaatctgggttgggccatgtcccttgcttcagtccataggacaatagcaaacatgatgcaagctgaggcttaaaaaatgtttatacaatagggtttgccctcttgctattagcaaccctgagaccaccatgtgaagtcatccaagccagaaggctggataatgagagaccacacaaaacagaagtggactgactcatctaaggcttcctagattaatcagcctgccaactgcctgccagacgtgtgggtgaatccatcctagaccatccatccttagctgagatattaagaccagaagatctgcagccaacttacagaattgtaagaaggattaaatgcttgttgctttaagctattaatgtttgggttgatttgttaggtagcaaaagctaactgatacaagtatattttaataagtctctagtcaaaatttgcatttacaaagcaacataaaaagtaaatttcttggaaattaaagagaaacacacatggattatctactaaaaacatataatattaagaatttttaccaaaaaatttaataggttgagagtaaaatattcttagataggaaatgagaattttacaaataattctctccaaattataaacttaataaaaacaaaactattttgaaaaataacaatgaacaatggcagattatcaagcaatagcacaagcagttttcttttataagaaagtaaaatagtggaccgggcgtggtggctcacgcctgtaatcccagcactttgggaggctgaggtgggcggatcacgaggtcaggagattgagaccaacctggctaacatggtgaaacgctgtctctactaaaaatacaaaaaattagccgggcatggtggcacatgcctgtaatcgcagctactcaggaggctgaggcgggagaatggtgtgaacccaggaggcagagcttgcagtgagtcgagatcacgccactgcactccagcctaggtgacagagtgagactctgtctcaaaaaaaaaaaaaaaaagaaagaaagaaagtaaaatagtgtggtagtgtggtactgtataaatttgtattcaacatttattcaagaaatatttattaagtattcactaggtgccaagcactgttctagctattaggatacagcaataaataagacagatcaagtgacagtaacctcataaaggttataaatcaagcaatagattatagaacaaaagagaagaatacaaataagcccaggtacctatgaaatcttacatgatgatgaactaaccaaaacaatgaagatgtgaaaagtgatttaattgtattgtaatagtacataagtactttaagaaatttaattttttaatattgcttatcagtagtataatatattcattcttcaattgtccataagctataaataatactattctaagcccttcaggttgaatgaattaatacattgcacttcaggtttttataagacctgattaaaacctttaatctttcacaatcacaagctcaagtagtagacttaattgttagtcttaattatttctgccactgtggtattatgataatccacattgttgtcatggacttatgggcatagtattctttcccttcctttgactttgggcttgggtatgtgacatgctttggccaataggagcagggctttaaattctgcttgtatgattggccatgtcttcccacacttctgctttttgccatgaaaaatacatatttaagaagtttttggtctgaggaggataagagacatatggggtaaacaatccacagctggaatcaagcccaactaagcccagtctaggtcagctgaacctaagctgacccacagacacgagtgagaaataaatgcttactgttataagctactgagttaccataccaacacataggaagatctatacattttaaataactgaatgcttaaaaactaaaagaaaatattagggaagattttttttccctcaaatatggaagattaaaaaaataacatataatgactttatttaaaaatcagtactatcaaaaagaaccaataaataaatgggcaaaagacatgagaagacaataatttcatataataaatacataaagaaaaatgttaaatttgaacagcaataaaaaatgcagagtaaatccataataaagcaccatttccaatgctctacttattaaaaatatgaataatataagttgtgttttggggaaactaggccactgctcttaagacagagtccaagcacttcacaatgatcactaaaccccactccaatgtcatctcccacccctcccccaaatccagctccactgccatctttctgaaatgttcttaggttccgccttcctcaggtacctctcatacattattcctgaagatattccttcttcctccttgtcaccctcacttcccagctcaccactacctctttctcctagttgacagcatataattttactatatcatgtttaccctaggagatatggtcactacatggaataatggcagaattgtccctattattgaaattgtttattttctgtatccttaatttttgttgcacacctgtacttgattccatgtgactccattgactttatgacaatggaattctctctaaaatttcagtacagaatcccactttattggtgacctgctaagggccttacattaccttctcatagattattgtctcataaaagtcatggcaacaacattgcaaagtaactataaacatactcatttttatagaaaaataaagtctcaaagaggaggttaaggacacttccaatctcagctctcacatgtaatgagcttggaagtcatcactcccatccttatagcaagaaatgtctgaacaaactgaaaatccatcacttttcttgggctcatcagaaaactgacatggcagggcaaactgtgactccaaaatctgggcatccaggggcatccaggaagtcacagttaagatctacttacctggagcaaaagctgttgaagcctaaagtagtaagaactctcaaatagtaattttggtgaatttgtggaggctcagtgtacactagcatgatagtgagaaactcctgggatccccagtcttagaagggggccagattttcataaggcttacctccaggaatgccacaaggtctcacaatgaagatccaagaaagattccctcctggctctggctgggtataggaaaagtaatccttgttaaatatgtacataacactttccataacaaagacctactttcccggggggaaaaatgttgccagagccgtattctttctgggaaagggatatttctcttacgttagtctccagtcttcttattttacctaaagaggctgcaggggaagaaaacatagccaacagtggacatgaccctaaggaaatagactgggaatgctgaaaccagggaagaatgtaggtggaagaggggaaaatagctacattaccagtagaacagttgtgaaggtcacagcccaaagacataggctaaatagaacactgagatttaattgaaagattacaaaacactccccttccccaacaccttataccaagagagctccattataatgacaatatattacagctgacagagtctttctaaagaggaatctgcagggaaggccaaaatcaagataaaaacaaggatactagaagaatttgaaacttcttgcacttatagctaagccttaaacaaagtcatatttctagccagactaataaaaatcctcacactaaagacctattttcagccaatacaatgtgttcaactttcaacaaaaaggtacaaggcatgccaaaagaagaaacaatctgaaaaataaaccaatcttcataactagacttagatgtgatacagatgtttgaattatcagacaggaaattaaaataactctgaaaaatgtgttaaagcctcaaatgtaaaaagtaacatgcaagaagagatgggtaatgtaagaagagagataaaactctaagagaatcaagtggaaactttagaaataaaaaacactgtaacagaaataaagaatgcctttgatggggctcatcaggagatttgatgtgattgagaaaagaatcagcgcgcttggagataagttaacagaaacttcccaaactgaaatgcaaacagaaaaataagtgaaaaatgcagaaaagaacatagaagtacttaagaaaaatttcaaaaggtagaacatatgagtaatggaataccagaaggaaaagaaatgaagcagaagaaatattttaagtagtaatggctgagaacttaccaaaactaattacagacactaaaccatagatctaggaagctcagagaacactataaagataaatacaaacaacaacaacaattaaaaaaaaaacctgaggccaatcacattccaactgtataaaaagacaaagaaggccgggcgcagtggctcacttccataatcccagcactttgggaggccgaggtgggtggatcacaaggtcaagagatcaagaccatcctggccaatatgataaaaccctgtctctactaaaaatacaaaaattagctgggcgtggtagcgcacacctgtagtcccagctactctgaatgctgaggcaggagaatcacttgaacctgggaggcggaggttgcagaccactgcactccagcctggcgacagagtgagactccatctcaaaaaaaaaaaaaaaaaaaaaaaaagacaaggaaaatcttgaaagaaaccaaaggaaaaagcaccttacctaaagaagaacaaggataaggattacagtggacttctcatcagaaccataaaagcaaaaagagaatgaaattgctatgatttgagtatgtccactccaaaatttatacgttgccagtgtgagatatgtgtgtgtatatacatatatatatatgagggcattaagagtaattaggccactgagggctgctcccttgttaatagggttaaggtccttttaaaagaggcttccctcaggttcagctagcttgccctatttccttttgccacgtgaagatgtagcaagaagctcatcagatcaaaggaggaaaaattgaaagcctttcctctaagattaagaagaagataaggatgcccacttttaccactttgctcaacacagcactggaagtcctagccagagcattagtaagaaaaattaaaagcacccaaatttgaaaggaagaagccaaactgttcctgcttgctgatggcatgatcttatatttagaaaaacacagtccactaaaaaattcctaaactaataaataaattgagtaaagttgcaggatacaaaatcaacatacaaaaatcaatagcatttctatatcccaatagcaaacaatctgaaaaagaaatcaagaaagcaattccatttataatagctacaaaaatatactatcaataaatttaaccaaagaggtgaaatatctctacaataaaaactataaaacacagatgaaagaaatcaaagaggacataaacaaatggaaagatatctcatgttcatagattgaaagattattgttgttaaaataaccatactatccaaagcaatctacagattcaatgtaatccccatcaaataaccaccagtaacattctccacagaaatagaaagaacaatcctaatattcatacagaaccacaaaagaccctgaatacccaaagcaagcctgagcaaaaagaacaaagctaactatgttaaagcaaactaaatatggctgagaaagactccatacttctgcatttgagtcctcatggatgaactgtaacctagcttaacagtcagaaaaattgaaaacctaacttaatagtatgcacctgtaacaatagctgagcattggccaatcccagcgaccattcttcaaccactcatagactgctaaatggtcactgcattcaaataaggcaaattccaggctgtaaccaatctcactgtttctgtacctcacttctgattcctgtatgtcactttacgttttttgtctataaatttgttctgaccacaaggcacccctggagtctctgtaaatctgctgggattctggggactgccagatttgcgaatcgcttattgctcaatcaaactcctttaaatttaatttggctgaagtttttcttttatcaactataagaatcctaaaagaaaatctagaaaatactcttctgaacattgatctaggcaaagaatttatgactaagtcctcaaaagcaaatgcaacaaaaacaaaaattgacaattgggacctaattaaactaaagaccttctgcatagcagaagaaactgtcaacagagtaaacatacaacctacagaataggagaaaatatttgcaaactgtgcatctgacaaagagctaatatccagcatctataaggaacttaaccaaatttacaagagaaaaacatcaccattaaaaagtgggcgaaggacataaatagacacttctcaaaagaagacatctcaaagtggccaacaaacatatgaaaaaacgctcaacatcactaatcatcagagaaatgcaaaacaaaaccacaatgagataccatttcataccaatcagaatggctattattaaataaaaaaaatagcagatgttggcaaggttgtagagaaaagggaatgcttatacactgtcaatgggattgtaaattagttcagcccctgtggaaaagtttggacatttctcaaagaactaaaaatagagttaccattcaactcagcaatcccattattagataggaacccaaaggaaaataaatcattgtaccaaaaagatacctgcactcacatgtttatcacagcactattcataatagcaaagacataaaatcaacataggtgcccatcagtggtggaatgtataaagaaaatgtgttacatatacaccatgcaatactatgcagccataaataagaataaaattatgtgctttgcaacaacatggatgcagctggaggccattattctacatgaattaacacagaaatagaaaaccaaatactgcacattctcacttacaagtgggagctaaacattaggtgcacatggacataaagataggaacaatacacagtggggactccaaaagagggtagggagcaagggttgagaaactacttattgggtcctatggttactatttgggtgatgggtttaatagaaatcagcatcacacaatatatccatgtaataaacctgcatgtgtatcccttgcatgtaaaagaaaagaacaaaggtgaaggcaacagaccacctgacttcaaaatatactgtaaagctatagtaaccaaaataccatggtactggcataaaaacagacacatagaccaatggaaccaaatcaataacccataaataaaaccatgtattaacagccaaccaatttccaacaaaggtaccaaaaacaaacattagggaagggacagtctcctcagtgagtggtgctgggaaaactgaatgtttcatatacacaagaatgaaattagaccgctatcttcaccatatacaaaaatcaactcaaaatggattgaagacttaaatgtaagacctgaaaatgataaaactactagaagaaaacattgggtaaacactttaggacactggtctggggaaagatgttttgggtaagaacttaaaagcataggcaacaaaagcaaaaatagacaaatggaattatatcaaactaaaaaacttccgcatggcaaaggaaccaaccaacagggtgaagctacaacctacagaataggagaaaatacttgcaatatatctcttctgcaagggattaatattcagaatatataaggaactcaaataacagctaaaaaagaaaaaatacaaataatcaaattttaaaatgagcaaattatccaaacagacttatctcaaaaaaaagaaaaaatacatacaaatggccaaaaggtggatgaaaaatgttcagtatcactaatcatcaaggaaaagcaaattaaaaccacagtgaaatattattttgcccctgttaaattatgaaaattacaaaaaataacaaatgcttgcaaggatatggagaaaggcgaactcttatatactgttagcgggaatataagttagtacagccattaaaacaaaacagtataaaactttctcaaaaaactaaaaatagaaataccatttgatccagcaataccattactgagtatagatccaaaggaaaggaaatcagctctcggacgaggtatctgcattcccatgtttattgcagcactattcacaatagcaaaactatgaaacaaactaagtgtccattaacacatgaatggatgaggaaaatgtagtatatatacacaatagaatagtattcatctattaaaaattataatttctgcattttgcagtaacatacatgagtgtggaggatatcatgttaagtgaaataaatcaagcacagaaagacaaatactgcgtgttctcattcatatgtggaagctaaaaacgttggttacatagaagtagagagtagaatactggtttccagaggctgataaggaccagaggagaggagataggcagagcttggttaatgggtacaaaattacagttagatgagaggaataagttctggggttctatagtgcaattaggtgactacagttaacaacaatttattgtatatttcaaaacagctagaagaaagaaatttgaatgttccaaatacaaagaaatgataaatgtttggggtgatggatatttgaattgccttgatttgatcaccacaggttgcatatgtgtattgaaatatcacctgtgcctcataaatatgtacaattattatgtatcaattaaaattgttaattatatttctaaaaagaagcctaataagaccaaatactggcacctttgtcttggatttctcagcctccagaattgtgagaaataagtttctgttctttgtcaattacccagtctgtggtattctgttatagcagcatgaagacagaagtaaaatgtctgaagtgttgaaagaaaaaaatcaacaacctagaattctgtatccaaagaaattatttcataagtgaaagaaaaatctttctcaggcagacaaaagctgagggaattcactgggagcagatctgccctgtaagaaatgttaaaagttttcgaggcagaaggaaaataacatggatctgaaatttggaggtacataaagaacagggccgggaatggcagctcattcctgtaatcccagcaatttgggaggccagagagggtggatagcttgagcccaggagttcaagaccagctggggcaatgtggtaagaccccatgtcaaaagtgtttttaaaaaacattagcccagtacggtggcaggtgcctgtggtcccagctactcaggaggctgaggtggcaggatcacttgaacccaagtgatcaaggctgcagtgagctctgatcaatgcactctacgttgggcaacagagcaagaccctatctcaaaacacacaaacacacacacacaggcacacatgacacacaatgctgggagttcagtggtgcaatcacagctcactgcagcctggacctgctaggctcaagggattcactcacctcaccctcccacatagccaagactacaggcacgcaccaccacgcttgattcatttgacgactttatttaaagttttgtttttgttttttttttttgtagagaaagggtctcactatgttggtcacaaacttctgggttcaagccgtcctcccacctcagcctcccaaactgctagaattaaaggtgtgagccactacacagggcctaaataataacttttcagaagtaacaaaagtaacaatgtattggagtgattatagcatatggttaagtaagataaatgacagcaatgtcacaaggtacaggagagaaaaattagaaatattctgttcaatgacacctgtacttcatatgaagtgtgttataatgttatttaaacacagactgagattagctttccagaaaatgtatattgtacactctagggaaaccactaataaaattttttcggtataattaatatgctaagtggggagataaaatggaatcatagaaaatgcttaattaaaaccaaaaaaagcaaaagtgcaagaaggcaaagaagcaaagagaaatacactgagaagaaaacaattacaaacatgacagctgttaatgtgactattatatcaataatcacttaaatcagaatagtctaaatacaccaattaaaaagcaaagattatcagtgtgggtgaaaaaaaatcaaagatgtggtaagtggaaacacccagatatggtttccagatggtctcaatatacaataaaggcacaatagaatgactgggcatctcttttacagaaaaaaaaggactaagtcactgacctgagtcaagctacgtccatcaaaacatacaaaaacacatagagcaaaaacatgaaatagctctagatattcaaagagttgttaaggtagttgcatatactagttagaaatgcattcggttgcaagtaagaaaatactgtataaacactggtttaaacaaataagggtttagatttctcacctaagagaaaggccagagacaggcagtttctcgtatgggttcagctgctcaacagtgtcatcaaggagccagactacctctctcttttcattccatttcctttggcatttgtccttatgtctgttgcctcattatcccaaagtggccaccatcgttttggacctcatgtccttattcaagacaagaaaataggaaagcggcatgctaatagtatctgtcccaccttaagaggaaagtaggtgctttccctgcaattccctcagaagacttctgtttacatcttattggccagaactatgttacataaccacctgtagatgcaaggtaggctaggaaaatttgtattttgctttttcaatctatgtaatttatgtaggtgatacagaaaaaggtagaccaacttccttttagtggctaccgttgtatatccaaatgaaaacagaaaaatgtaattgtccagctatcattagttttgttttttcttcttttgttgtctaagtttttgatttctcaaaaaacagcaaaaaatgtttctattgaagattatctaggtaagccataaattcacctaaaacttgatctacttttttccttctctgagctatatctggagtatatgtttccatggattaggacaatatggctcaagggaaaaaacataatttaggtgaatacattgtgcaaaagacatgcaaaatccctctaggttttgcatacaagaggtttaagttatatcattctaggatgacttagggcatttggtgtagagtaccaagccaggagtccagtagaacattctcaattgcaaatggttgaatatccaactccagatggcttccttaagcaacaaaaggagtttcttagtttgagcagaggttgatccagtgagtcaataatgtcaccaagaaatgtgtgtgtgtgtgtgtgtgtgtgtgtgtgtgtgtgtgtgtgtatgtgtgtttccatgtgtcttttctgccatctatatcagtttcaccctaaggttggagagtgactcatgctcacatgatggctgccaacaattacaaagttaatctttttctcatatacatttaaaatttgacaaagagataaagagatatcttgttcttatctcagccatttagtttgctaccatgtttcaccctgttctgactgaatcctaattgatcgatcacatgcttaccctggaatcaatcactgtgacaataagagcacaatgatctgactggcttctaccaactaaggctcatccctgtaaccagtgatgggatgaatttcatctaaaatgtaaaatgcatagctacatagagagagggggtgcgcctggggtgccttgcagcaaccacaatttctactagatcaagattcctgcattgcttctctaccatttgtgaggacaggaccccatgaaacttggattcttcttctataacatacgaatggtaaaacctactcaatccatgccttggcgcccttaaaaggattaaatattaggtgactattacttttaatggcaaaaaccacaattacttttgcaccaacttaacaatataaataaagatactttgtaaactaaaatttttggcaatgaaatttaagtttctggatgaatttccattatacacactgggcagctgctgcataaccacctagatttacttggccttcccattcctgtttgcaccacacaacttccagtggcaggcatctatgtccctttgccctgagtgttttctctaggcaccggccctctctgcccgtgtggaagtcaagtcacaagggcgagggaattagcatccttttccatagccctcaatcaggctagcctgtgagtgacagaatcaaggaatcattccttgcttccgagatgggatcattctggcgtgtttttcacagatcacagagtggcacagcatgattaaactctgggtgcccactacggtaactggcttgctatcacatcttatgttggcttccttccctcccagtcttagtcccacccctgcttactgggaccacctcccagataaagttcttgcgctcatatccttgtctcaggatcagcttctggaggagcccaaatgaagacatagaacaaactagaatcacatgactatgagaatgctaatttgacatgaaaagtatattccagacattttattttaaaacacacacagtgattctttttaagttctttctgtgtgttttcattttctatgcatagtatacctttgtttctagttaatttatcatgctgccgggctaactaaggggtcaagcatggcctgcctccagaaaagataaaacacacgcaatgatacccaagtgtatttttcacaaagtcctgccctgaggatatattatgctattagaatatagaacctacaattagtatatttatcagtaaaatacacactaggccatgataaatttgtgggtttgaaagcaaaagaaaagaaacacattcaagatgcattcacttagccattatcttttttcctaagttttgttgtgtactgagttcatttctattgcaaccaagctattaaactgaccatttcaagctagtaaactgaccaagctattaaactaaccatcaaactgaactggccatttcatctaggcccagaagaaatgatggcctattatgcgagtattttaaaagaataatttagttttaaaccatctagtagtgttgcatacaaatattaaaaagtgaactgttagctatatttgttttcttattttacaattaaattcaaatttggttaataacaaccctgcctcagggcctttgtaccagctggtccctctatctggagtgcatatctctgcatggctggctctttctcattatttgggtagtagaaagaacttcatgtaaaactgcactgtccagcatagtagccgccagccacataaggatgttcagcacttcatatgtgccatctatgtgaaatataggctggattttgaaggcttaatatgaaaaaatatattttattaatcattttaatattgattataagttgaagtgatcttttgtatactttgagttaaaacatgtattattaaaagtaattttacttatttctttttacttttctcaatatactcacagaaaattttaaaatacatacatggcccatgtttatagcccacatcatatctccattactcagtgtagacctaatataatccccatatcaacttcatagcactgtttgtcatcaaagcactttgtcaccactgcaattgtacaagtaaattaccaattgtttacttgtatattgtaagttccaggcatcttttcagccaagtttactctggcatatagtagattgaaaacatacttgatgaaataaatagatgaaggaataaaggaatgagggactataaggtctgttttcctgagagctcccctgtctatagtaactccacctcatttgagtgtcaccaggttaatgagctagactacatccccctggaggcaggggtgcaacacacaaaagaaacagaacttgttcactggccattactgaattacgttttgtggttctctttatgatagtaccatcagaaaggtaagactatttgtttcatctggtaagagtgaccaacccacctaacacagacctagctcacgagaggatttgctggttattaggaaactaatgactcagtaactaaggtgattgactgggaccaaaaagactctagctgaccttctgcttaggcaagagtcattacagcaataaagaaactagagggactgtgctgggctagaagtcacctctaattgctggcctctgaatcccataactgccactaaatggctagcagtgttatataagtgatataattaagcttcatagctaacaaccccattaagatgaatagggaagttcactcttcactcacaacaattacttttagatttgcctgtctgaatactcaaagactttgtccagactgaatcaaaacctacttatactttgccctgaattgactctgtcctgtacagaaagccagcagccaggggttgggcaactgtagtgctctataagttatgagagaaattgtcattttctcctttcttatcttagattttttatattcaaggaacagagaaggtgtagaattttgaactcacatccagattgcctagagttcaaattctaccctggctagcgatttataaaaaggctttaaataatggtttaacctttatctgtttatgtttcctggttttggatatcctcactgcaaaatactttgttaaaatgaataaaaaagaagagtgtcatttttatgtatatactataataattaggcctttcctaagacagaaattacttgtaagaatacatttaaaacttaccatctatcttgaatataaacagaaaaacctctctaaagtttccgccagtctttgtcaaatgcctgtaaaattttagcctaatattttaatattactcttcatatataacaaatgttttggaatatctagattttttttattgtgataagaaatgtgtcttaatttaggctataatcacaaagtaccatataaataaataatgggaattatttttcatcttctaaatattaggaatttatttttcactgttctggagactggaagtctgagattgaggtgccaatgtggtcgggttctgatgagggcccagttcccagctgcagatggctgacttctcgttgtatcccaacatggtagggaaaagagcaagggagttctctggggtcccttttatgagggcactaatctcatcttgagggctccatcttcatgacctaattacctgcaaagtccccacctcctaatactatcacattgagggttaggatttcagcataaattttgaagggacacaaacattcagtccactgcaaatatttaacatgagatctaccctcttaacaaatcttgaagtgaacaatacaatattgttactataggcaaggcaatatctggattattaactatgtttttcagttttaaattatgtggacatgatctgataaagggtaactttgtttttctacctcatgtctaaatgcctgtaactggccccactgctctgttcattgttttttctgggctttttttcttttctttttctttctttctttgtctttctttctttctttctttctttctttctttctttctttctttctttctttctttctttctttccttccttccttccttctttccttccttccttccttccctccttccttccttcctttttttattttgagacaagatcttgctctgtcacccaggctgcactgcagtagtgagatcacaactcactgcagcctccaactcctgggctcaaacaatcctcccctctcagcctcccaagtagctaggaccacaggcatgtgccaccatacctggctaaattttttttttttggagttggggtcttgctccattgcccaggctggtctagaatttctgggttcaaaccattctcccacctcggtctcccaaagttctgggattataggcataagccaccacatttggccctcttgttttccttttttttgttttgttttgccattaatttttacctaatttcacaaaggcacatgctcattattctccttattcttattatttataactggcttatatttgaataataacatgcatcatttatttcattgcctgtcttcctcccttcctttctccctccttcctttctccctctttccgtcctccttccctccctccatgcattcaaaaaatacactctgtgcttctactacccaacagtgagtgaaacatgagacccacctctggccctcataaagctcctctagtggaaaagacatacataaacctgtttatcttgtttttacatttaatttgcaagcctcttgaaggaaaggaccacttttcatcctgcggtacaagagagattcccaggaatgcctcttaacatgaccaatgccctgtatctttatttatatttatgtttaaaactgactgtgtatttgcttctaggactcttaagattttcagtgaacagttgaatcttaaacccttcttgggggatacaaaggaaatgaagagggtgaagcctgtgttcaagaagcggccaggatggtgcccaaatctagggatttacaggtcaagtcatggcttgcactttatttcaattattctgtagagtcactccttcaaccagccgtgctgacttcacaccttttgcactagtgccaaggccagactcaataacttttccacttacgtagctttatctagcagttaacaaacatggatttatccttggaaaatcatttcagatgaaagtttctctgtttaaaattattccaaatagataaagtcacaagtttctcctaatacacataaatataacttgatttcccaaaacaaaaaaatagaacactttaaattcacaaaggtactatggctactgcattgactttccacatctgattccttcatcatctcagaaatcaggttaacaacaatccgagacataacccatagtgattaataaatagtgatgtgaaattgtcaatgccaagtgtcagttgtaccatcacctgcatcaaatgaatgggtctccctttgagcaccatcaggtgttgagtgctcaccatttggaaagggacctgtccctttgaattgcaattatgctagagcagagaacctgcaaagggtgtcatctctactgcaggtagctcagactgtgatcctggaagctggtcaaccccacacctacaaaataaacctcaacagcattaaaaccatcactgtaaacctccaactcaccttctagtgaagtttctctctctctctctctgaggctgaataccagttcccaacaaaggaaacaatgggaatgtgatatctgtggttggaaaaagcactgcctttaaaatatggtttattttctcataaatccacttgacttaatttatctaaatcccatttgtaatttaaaaaatgaaataaaacaaaataaaataagacaaagagaaataaaacaaaattgaaaacaccaacggagtggccaaagaagaaaactaacattggaggtaaatttccacctaatctggattatgttaccaaaggcagcttcctgccttcccagtgagggggaggagttaagaccaagcttcattagccataatgataattacatgcattttcaaagaggctattatgccgaggcttgaagtgctctataaacattaattaatttaagctctgggtagcccagcaccattatgtcttttgtaaagaaaagtaaacagaagtgcttagaagctaagtggcttcactaggctcatttagccagctggcagcatagttgtgaacaaaactgagtctgaatgacagtctccaatgccagtcacaggcacagaggactgcaagggacaaagggaaggagggatactgcaaagtgggattagtaaggaaacggcacaatcctaaatgggtttcaaagtgggagtgatgtggcctgatttgcatgtttaaaagaccattcgcacaactgcggggagaatgggattggagaaaggcaagagtaaaattaagaaggtcaggagtgttgaaggagccctggaaaagagatgatagagacctggctgagagggctagccctgaggatgagaagtgggtggatttcagatgcgctttggtggtagaaaatcagcagggcttgctgttggataggctgtggaggggaagggaggggagaaatttgaataactgggtggatgatggcacttaatttgctgccattttgcattatgcctatcataactatctgtattatcacaaatctttagacattgtcaatcaactaaaaaagaaagaaaaatagcacttaattatcataggaatttctatttaaatattaatgtgcaaaaaaaaaaaaggcaatgagaagaggaaatacatccagatttttactctgggtgatcagaactatcataaatataggtttagttttccctgatgtaatggcctgtgaaaatttaaaaatgaagaaaagtttgggatgaagcagtaaaaaattgtgggctctgagatggtaaactttttttttttttttttgagatggagtctcgctctgttgcccaggctggagtgcagtggtgccatctcggctcactgcaacctccgcctcctgggttcaagtgattctcttgcctcagcctccctagtagctggtattacaggcctgcgccaccatgcccggctaattttttatatttgtagtagagatggggtttcaccatgctggccaggctggtctcgaactcctgacctcatgatctgcctgtgtcggccttccacagtgctgggattacaggcatgagccaccgcgcctggcagatggtaaactttttgaaggtatccacccctccatacgcactacccatctccaggcctagcacagtcagtgatgtgatgataaatatttagcaaccagctttgcagggagaaaggaatcaagttaggggagccctgattggtaacatttgctgatttcaatggcacaaatattccctccatggctgagttcaagctaccaacatgatgtcattcaatggagttggaaagcaacgtacagaagcacatggttatacagtgcatccaccacacagatgcagcaaatgtgagtaaattcaaggtcattgtaaaatgtaaagaggaaataagttttgagtattacttttgcttgtaatatcatatctttaattgtacatttatgtaatttaattctgaataatggccatgattaaaagcagctcacaacgtttctgaaattttaacattcagctctcacaagtcactatgtccatctttagcacaccattcatgattcactgtaagacatgctagataccaattgttaaaagaaaaactctaaacaaattaaatttaacaaagtctaattgaacaaagaacaattcaccattagggtagcctcccaaaccagaataggttgagagcaaggctggctctgccgtgtagtcaaagaggatttatggatagaaagaggaaagtgacgtacagaaaacggaagtgaggtacggaaacagctgagttggttacagctgggcatttgccttatttgaacagagttcgaacagttggccacctgtgagtggttgaattatggctgctgtgattggctgagaatgaactatttgttatgagaagattatagtcggcttctacatccagttaagctatagttcactatgtacacagaagcctgcaagcagaacttaacatatgtaaggaggcagctttaggctaaacttaatttaacacaatgaatgtttgtggaatgagcttcactggactccctaaactgatgaaaacatctgttttatcattcaaattctagaagggttttttttaaccaaaataattaataagcagttactaagcattaactacatgcacaaaagctgagtgctaggggttggggaaaataagtaacatgtattaaatgttactgtgtgccagtcactattctagattctttaataagtgaattaatgcatgcaacagctttataaggagctagtattattattcccatgttatgagggaaattgcagcacagagaagattataagctcgataatgccactacttgaactctctaatgtcaggataaataaattaaaatgaagtaaaatctctgctttcagcagtctcataaagagacatgtacataggtatctatttcacatgcaaacactcaatttagttcatggatcaaactttaggatcttgttcagattttaaactactgaaagattttatagtttcaacagtcacagtgcacttgaaattatggtctattttaataaaatgtgcctttatggataaataaattaatggataaattaattaattaaatgacaattcggaaaagcaattaattagtttggttaacatggtcaatagctgcatttttaattagcagtgatttagcatacattttttatagccactgcctatttctcttcatgccacaacttgcagagaattaagttataaaactagtttatatgcctataaaaaccacaagctctgctaaatggaaaacaaagaaggtaatttgtactgtcaaatcatctttttaaacttaggaggagggattaggggctggctgattcagagtaagaaatgcaaaacctgtaaggataaactcaccctttaaaataatgtctgacccaactttttaaatctattttcaaactacaacaaacttgtgactctgagggacaaaagtgtttgtccaaatgcttgtcacattggttcacactgaaaacagctttaaaatcacctcgcataaaatgtagtaatgtcataagacttctcagaatcctatgaatataacttcaataatattactcaagcatctatatgtttaaagacagacttaatcagtcttttgagtactgattggttttggatttccatacttttattttaattttgagacgtcttagttccaaggctgaaacaacttaattgcttttgcaacagaattccctacctttgatgggaagccaatgacagagactcctcagagggctgagttgttctgcctgtctgagccacttttattcaattattttacatctagagctcacaattttcctctgccatttccgggatcccttgttggagttgtgtccacctttgtaatagaattcttcccctgggcatggaaatattactgaggcctcctttaataattttaacaaggtgttgtgcaaaaagacatttatttcatgtgggcgatgtgtgggaaaaatatctttttaatcctggatttatatattcatatatatatatatatatgtatattttttgagacggagtctcgccctgttgcccaggctggagtgcagtggcgcgatctgggctcactgcaacatctgccttctgggttcaagcaactctcatgactcagcctcccaagtagctgggattacaggtgcacgccaccagtggatttatattttcttcccatttgaacccactttggatttggtatgaagtaactgccaattttaaaggtcttaagacagaattggggccaagatatattttgtaagtagtgagagtatctttatccagctagggccacgtgcaccagccccttctgactggaaggaggaacacaacagaccacggtggaaattgtctgcagagggctggtggctctgcacaatgcatggaagcactgagtcccctcaggcccagactcccctccaagagagacctcttggaggatacctaggaccttgtggggtacctatgttgcctcttaccaaaaggggctgccttggcttctgcattttctggaaaggtctgctactgagctctggaaccataaatcaggtcaaattgctcctctgcttgggaccttttgctgtttttccgtaattctcagaataaatccatgcctctccatagggatctgacccatgcccacctctccaagcacttcttcctccactcccctctcactgtagccatacaagccccatttctatgccttggagatgccaagccctttcccacctccaggactgttttaagtggtggatcttttgcccggaaatctcttctagtatgtcccttctcaaaatcaagtgtctgttcaaatgtcgcctccccagagatggcctccctcagactctgtcatgttctacttgagcttctatgaaggaataccacaaactgggtggcttcaactactgacatttatttcttacagttctaaaagccgaagagttcaagatcaagaccctagctgatttagtgtctgatgtgggcccacttcgtggtttacaaacttgcaaacagtcatctccttgtctatcctcacgtggtggacagcagagagaggaggcaagtgctgtcatgcctcttcctgtaagagcactaatcccattcatgagggcttcaccctcatgacccaactacttcccaacagccccacctccgaatgccatcacattggggattagggcttcaatgcatgaatttggaaggacagtccataacacactctctgccttgtcatcaagtaggggaagtgagagtgagagggaaggagccaggactgagagtgccaatgagcaggtcagctctgcaggcaactggagctcatcccctctgaggaccctctagatctgcatagaacagtcccccaagttacacccacatgggaaggaaatcagagtatttaccctctcctcctgtctgtcattgtttgaggactgctctcaggacctccatcaccgggtgcaggtcagacagagacgcactcctgtggtcagagaacaccctcaggcagagttacaagtcatcagagcagggagtccttggcatctatccatattgcccaggtgatacgggacattggcagtgtctgcaacaagctacttcagaatcctgaggggagctggccctgtgggtcttggtggactggatgcatggacagcattcctggaggtatcgccagctcctgctttaactcactacacacacttggtggcatcttccctctctgatgctcagtttccctgactgtatatcagggatctggatcacagtagtgttttttctaagtgtggcatatggatcacaggtggtacaaaaggtaagttcaggtaataagtggatggatatattttaattttaaggattacgctttttattacacagggtaactaaatgctgacacaaatacccccaagttctcagtggcttaacataataaacattgatatcttaaaaataataaaataatagataaatttttaaaataacattaatttcttgctcatggagagtccagtgcaggttggtgagacaggagggaggaaggcctgcacaaggtcattcaaaacccaagattccttccgtctattgaggctgccattttctagaactctggagtccttaactatattctttgcatccagacagtagacaaggggagagagaaagaaagggaaagagagaaagaatagtgcagatttcaggaatcagttctagaaatgagtgaatcagtaccatttctcggccagaattcggccatatgaccccaccggggtggaaaatgtaattcttctgtgtgcccagggtaagaacaaatggggttggtgaatgcacacatagaattttcaaatttgaaattagaaaaatattaggttaataataatggaggggttatatagatgtggcaaattgtgaaggtaggagatgagtggtctcccaactgcaagattttatatagaatttgtttatccaagctttgtgtcagtaaataggaacctgcatcatggagagacaattcagctcatttttctggaaactttaggaatcagttaactagttacacaataatgctgcataacaatcactctataacttagtggcatatctgcagaacaggtggggttggtgacctaagctgggctcagctggccttggctttaggcttcaagtcaggtcaaggtctgctccacatgtctctcatttttcttagaacagtggctgccccagggcagaagcacaagaaatatacaaagtctcttaaggccttccctcaaaactgacatactgttgcttttacccacaagccactagccaaagtaagtcacacggtgtattaatcgggtcctccagtgaaacagaaccaataagacataggtatagatagatagacatagacagacacagtcacagacacagacatagatgtgaaacttattataaggaattggcttatgcaattatgcaggctgggacgtcctgcaatctgccatgtgcaagccagagaccaggaaagttggtggtgcagttctgagaactggagagctgatggtgtacgtcccagttaagggtaggagaagactgatatcccaagtcaatcaatcaggcagagagagcaaattcttccttcggttttttgctctattctggccctcaagggattggctgatgcctacctacattggggaagaatctgttttactcagtccaccaattcaaatgctaatctcatagagaaacaccctcacagacacattcagaatgaatgtttaatctgggcaccccatatctcagtcacgttgacacataaaatcaatcatcacatatcactaagcctaatatcgatatatcagttgggcagagaaacactccacgggaaaacaatccaatttaccacaggattcctggaagatatccaaggcagaagtgagaaatcttgaagggaaaaaaaaaatcagggaaaatgagaataaaacttataccctatttatatagttttattcattaccaaaactttagactatagtatcatttttctttgatcatgcagtctctcactacgattaactgaatgatgcatactaaaattatagagacaagttagacaaagtattatgcgtcaacttcctatgccataagacgacactagtaaacaacttccttatgggctcaggatgaaactgagtaatgtattaagtaggcaaaacagcatcatctggtgataacttaatgattttagaaaacacacagtaggatcctaatataagataaacaacccagtttttcttttttcctttagtagcatccctgttataggaaaactaagctgaaattgaattaactaagttgaaatttgtttaatgctttttagaatctagatgttgccttcctcaccacacttaccaaactatactgcagtcagtatggtagattacaaaaccagccacacttccctactcttccctttatctataccctctgcaatgcacctgtataagtcttcctatcaggaggtggaattagctcacactttaagtctaggccagttttgtgacttgctttagacagtagaattcagcataagtgacatcctacaacatctgagtataggctcgcatctcacaaacttccattctctcttggaccttgtcatcattatgagaacaagtccaagctagtctgctggtaaatgagacaccacatggaacagagctgttttgtcccagctgagattatccttgatgaaccaggtcctgggccacaggcctcctcacacagatgcacaactgggattagcccagattggcaaaaccacccaacaaactcatagacttgtgagaaataataaattggtttttgctcttttaagacactaagttttggggttgttatgcatcggtagttactgacacacgtggagtgtactcagcccagtcttctacctcaccaatgatgttgggtatggccatggtgctttggccaatggcatgtaaaaggctgcaatgtgaacgtaaaccttatatgtgcttgtgtgggtgggctaggcctcttggagtgtccactgtctatgaagccccatgaagttgttgttctttcagcttgagttctgaaatgcaaacatgaaaacttgaaattgacctgaaacctgtactccatcctagaccacccaagatcgatcaaaccacagctgacctgcagatttgtaagtgtgaattaaaatgttttttgttataatccactgagattttggtgtttttgttaagtagcattatcacagcaaaaaccaagctaatatacacagtcttcacatgtaaagttaatgtactgtaggttgcatatttccttgctccataaactagcagcacccttgaaaacataatgcaattgtttattgattatatcataattgaattgtactgggaaattttacaaattaaagaattcttttatgaattctttctgtaaacctcagttaatggagaaagaccttccattatattgacttcttattccagattcaatatattcagtgctagattaaattgaaatttatctgaagcccaaagaagaaggcaagagtcctagtcatgacacccccgtggatttattctccttcgacaaatctaaatattactaacattatctaaaaaaaatctgccatttatctagcttatgaaagttctataacagaaaagagatcatagatgttctgaagattcaaaatagcattttttagaatgtatgagattatgctaaggcacttataacaaatatagtcaaaccctatattcaaagatgtatcacagactattatgcttatttctgtttattgaagtacagtttacatagagtgcacaagtctgaaatatacagctcaattaacttttacatacatgcacaagcatccagatcaagatggagaacacttgcagtactctgaaggaaagtttccttgcaacccatccctgtctatacccttcccataagcaatatgccgaactctcatcaccttagattagttgtgcctgttcttgaatttcatataaatggaatgatacagaatgtattgttttgcatctagttatttttttccattaaatattatgtctctgagaatcattcacattgttacatgtagccgccaaccattaattcttttccattggtgattagtgttcccttgtatagatacagtaaaatttgtttatccattctaaaattgatacatgtttggattgtttccagctgtgaactattaggactaaggttctatgaatatttgtacacgtctttttgttgatataagcactcatttggctgtctgtatacttcttaatggtattttaatgaaggaaattttgtataatgcaaatgtccaaaaatagagcttaggctaattattatatattcatacaggaacatatgctgcagccattaaaagtgttcttttggaagattttttaatggccgtatggtttcagttatatccccaaattatgtacaaatgtctatatacatagtgcagtctatgtatatttgcatgtgcagataaatgggttgttgtgtgtttacatgtgcacacgtgtgtgtgtgtgtgtgtgtgtgtgtgtgtgtaaacagaaaagaactataccagaggtaaacaataatcatctttaggtaatataaatatgtataaattcaatttcattttaaataattccccatattttcaagaggaaaaatattgtttataataataaaaatactttaaaaattataagtaaccgaaatcttctattcatcagtaaaatcttacatgacaaaccacatttttgtaatgctttcttttatttactattttatttaacctaagtaatagatcaaatcctactcctcttaccacagagccaatgagtcaggattggtatagttaggccaagccgacattctcctatgtggctctgcctggaccatttaataattccagtttctcattaagattattatctaattatacaatatgtaaaacaaggaaagaggagcaaggagaaaggcaacacctgagtgcttaattgagataacagaagtactgaacgaatctcagtaattagagccatcacaaatgagatgcctagaaaatattaaatagcatggtctaacagtgtattatattgcaggaatgaaccctgctataatgacgtataggtttatcacattttgaaacataacctaatttttgctgtttattttcagtttacagtaaacatttttattttaaatgcaatattctgagactataacttgttttattctgcataatcatcataacctcaattaagactctattttcaaatttaatttgccataaatggtcatctgaaagtctcaaccaaaatcaaagtcattttaggaaggagtctgagaacaaggcaatcctgcagcactaaacatttccttctaggatttctctagtctagggattagtaaaataggcaaaattgaaattataccattattcaattcactcagtacttctgttatctcagttaagcactcagatgttaccgttatccctactcttctttctctctctgttttagaatagttacttttcctagatattgtacaattagataataatcataatgagagagccacataggaggctgttggcttggcctgaccataccaatcctgactcattggcactatggtaagagacaggattttatatattgctcaggttaaataaaatagtatgtcaagtaaacaggccaaatcctacccacagtttctttttgtaagttccatgagcaaagaatggtttttacatttttatatggtcatattttaaatggttatataagtacataagtaacgcccttgattttttcttcttgtggcacgaagttgaaaatggttactatccagtgcttaataggaaagaaattgctgaccctcactctagtccccctatgacactacgatcttcattcatactaatgaaatggagtggggtttttggcagagataattctatgtggaaacagcattgtgcattcaacatacccatttcctttgcctcctaagcattataggaattctttatttcccaactgttcttgcagttgggtggggtcggtgtaactaagttctggtcaatggcaagtgatctggcccttaaagcatgctgagcctccatatactttttctctcttcacttgtgtgctatatgaatgttctacaaaatgtacagccactaattaggagcctgggtcccctcatcaaaggaagactgccctttggataccaaagtatgaagagtattgcagcataaacaaaaagcaaacttttattatgctaagccattgggctttggagggattgtttgttatagcaaccaatgttactttccctgactactacaagtataactggtttttcaatattaccatgcctgatattaccatcacgttgttaactcacagaaacacacacacacacaaaagtgtgagaacagtatatctttcaatctttgtgagtaaccaaaacatccctttaaagttttaattatttggctttcatggccccgacaaataaaacctttattccaaaacactactttttgtttatcacttattatggataaaagttgatggttatttactaaactacaatttcagaatcaagttagaccccaggtaaataaaggaaaatctcaacctttataaaataacaaccacgctaaatttgcattccaaaacgtgtaaacagctctttcatgcttattcctctacaaagctatttctcatttaactttcatcatcctgtttagagtttacaagtgagaatcttcagatttcagtttagacacatctggctcacaaatgaggcactacaccctgagtcattgtgaaatcctcgccacaagcattgatgatgagatcttgtgtttattagtaaagacgttagaaccagccagtcgcaaagctattttaagtggagacatctctgatgtggcatcttagaggtgtcagtttgatctttctctgctgaggaatggctggattaaattccacttctaaatgcaaattaatcagttttagctttctttcagatataatctgaactgaagttgttgaaagattatttcaactactctttagttattaaaaaaaaagagttaaaacttctagcctgttggattttttctttatttcactgagctcttttgacttccctagggtataattatattccttgtgctttttaaaaaatgcaacataaagctaaggtatttattatttttaaatcactaaaaacaattttcattaacaacaaatttatttctcctttgtcttacaccaagcctgacttgctccccaaaacaaagtgaacaaaaaaaagaatttaaggctaagcttttaagaatggattgataatgacttttgattgcagcagacaaaattactgattcatagagttcaccctgaggacagccctcctctaatatggtcacagcccactgccctgagggagttggatgatgttgacaaacaacttggaacaaagtgaagtaaattcccaggaaattagatgaactcatgtttcccctttctccacacataagaaaaagatagccaacacaccaacatattctcaatcaagaatttttcccatttaacctcacaaaaatgacttagcatctccgtatcttgaaatagatttacccacaattgggaaaaatctcatcagggactccctgatgtgatgcactgagaagaacataacattatccaggcagtatccctagcccaaacacataatccgaaattaatcctagagaaacaaacatacaaatacaaactgaagggcattctgcaaaatcagctgacctaggctttcaaagaatgttaatggcacaaaagaccaaaagaaaaaggaggactgggagatgtggactgttgaagaccgaaggtgataaacagacatgacaatgacaataaaatgcagagtgattctcacctgaatcctggacagaaaagagtcgctgtaaagaatattatagggacaatttgaaccatttgaatgtggtttataagttagatcatattattgtgttgatgttaaacgtcctgagaattatgctgtgatgatgtaggaggatctccttactcttaagaaatacctactgtagtatttgaggtgaaaggttgtatttagcaggtttctctgtgtgatgaactaccctattcacaagagcaaccatttattttgccccttattctatttaggctcagcttacctgggtgctttctctggtttcagctgtgttctcttaagctctcttatgtgtctgcgatgaactgtaggtctactaggtggctctgcttctgagaataggcaggtgtcagctggggcaacagtggtgactaggatcactccagcaggctagtcctggattaccaacatagcagtgggaaagttccaatacagagacaggcacacacacacacacacacacacacacacacacacacacacacagagagagagagagagagagagagagacagaaagacagagacagagagagagattgagagagaaaggaggcatgtaaagcttattgaaacctaaccacagaactggtacaacatcacctctgctgcgttttgctagtgaaagtaaatcacaaggattccacgggtacaaagccagcttgtaaaaagcctggagacaatggtgagaaaactgtggtcattttaaacagtctaccacaaggaactacagatgttcattcaattatgcttgcaacttttctatagctttccatttattttaaagcaaaaagtaatagaggatggcgcaaggagccagacacaaaagagtatatactgtaaaattcaattatattaattttcaaaggcaaatcaaatgtatggtgagagaagtcagaatattggtaactttcaggtaattggcttctggggtactggtaacattctgtttcttgatcggagtagcaaaaattccatttggatatgcacccaggatacatgctgttttctatatgtacagcatactttaatttttgaaagtttactttgagaaatacaaagcacgttggtcttggaagttaggaaacctgggctcttgtcctgatgctgctaccaagtccctgtgcaatattgagaatgtctatttaattctctgggcctgttgcctcaactgtaaaggaagctaaatgaactctgtgggcccttcccaacatgtagaccccaagatttaattctgaccaaatagtttgttctcttttttgcctggaaattacataaccttgtaattatgatgcacttttctcccccagttataacatgtgcctgagattctattttgctttccagaatttgcacggaaataataacaacaaagcaaatgcaataaaggggtctcttttcaatgcagataggaactataagggttggctatttgcagaagaggtcactggaggagcaggtcattatgttttaatatcacacagaaatgcagtaaaggagtctggcatgtcagggagaatcatcaggaatgcttccaagaagccggtcctatttcaccaccgctccagccttgttctggggaagaatagcactccctctggaatagtttcttgacctcctcagaaactcacctatttggtggtctcttgcattctctgtacagctaggggcttttagcatgaagtgaaaagagctacaggtgaaccccagtcttcataggttttgtgtgtgttggagcatagggaagtggaatgttgctggcgatccaggtgtcccacaagcctggcagctgctttcaggggtggagaccctgggagcacctctgattgtggtgattttctcatttctgagcactgtgaccccttcgtagttcaaaggagaggctctaatggaacaacacttcaggctttctgttcgtttgtgtttccttgagggcttccagtttacctctaaggctccttggagctccaaatttcagcagttttctaaaagtttcattcattgaatagatatttatggagcatttactatgtgaattcagaagtgaatgaggcaaacaagcacactgccctcatggacagaatgtggagtcctgtatcgatcagacagagacctagaatgacttgctttttcctccatgtgagagtgatagttgaacttcacaacagcctgagagtagacattcttagccccaacttacagatgaggcagacgaggaaactgagactagggagataaaatagtaagtgaagtccatctgactaattccttcatatacagcctctaaaacaaggtggtgaggttgtgcccagtcccttaggacagcggttgacaaactaagtcatgtggtccagctgcctagctgtatacacgaaattttattaaaacacagctatacccattccttcatgtattttctatgactggtttcccactgcaacaccagagttgattaattgccaaagggaccttacagcccacaaagacaaaaaatatttaacatcttgccctctaaagaaaaagtttgccatccctccagcctcagaacattgccccctagttagggtaatgaaagttcctggaacaaaccacaaaagtttaatggcttcacacattttttaaaaaagtttatttctcaattacacaatagcccagccagggtgttcttgggcaaacgtaggggtcaggtagggactctgctccagagacccagactgatcattgctctaaggttaccctgggcaaaaacatccagccagcagacaggggtaaaaaagaaaagatcatgaacaggaagtttttatgggctagatctgaaagggacacacattaatccacccatattctattggccagaattcagtcacgagcataggatactgagaaatgaagtgtactagaatgcccaggaagaaacaggttttggggaacacagaacagcctccaccacaatccctaaatactaatcattctcacacccagaaaacgtctctggctgtgacttctcaaatctgttttaaagctcagattcaatatgcatgtgtttaaaaaacattgcttaattgagcccttacctttttgagatgcatactgaaatatgtacatatgaaatgacatatcatgaatttgcttaaaataatctgaaacggaggaaatttttgaaaatactgagaatgcaggtaagacaagattggccataagttttgttgaagctggcttatgagtaaggatttagtatattattctctttacttttgtatatattaaaaactttccatagtaaaaaaaattaaggattacattgaaactactctttgctatgttgtaccactctttggcaaaataaaataaaaacaataaaatcctagtcataataggccacaaggttctctgcaatgatagtaactacaggtgttctggcttattaatttctcttacttccttaaaatattccagtcaaataagcctgcctgtaagataaatgggaccaataatgaaagacaaaatctacgtgagaatagtacaatcaagaggcagaatggttataaaagttaatgtcagacacctatagtacaagcactcctaggaaaggtaatctattacttggggtataaacaaataccagatttgttacatgcattttaaaaacactaattgagaattactctgtgcaaggcattgtctcaaagattatacttgtcaggatgtatatactattataccagctgctgtgcaaacatccctacatcacaatgtctatgaacaaagttttatctcacttgctcaaggttcaatgcagatattcctggtccaatttttctcttttgagcagtaactcaatttgagttcctttcacctcagagtcctttgccatgtagaaaggaaagagagggctgggcacgttggctcatgcctgtaatcccagcactttgggaggccgaagcgggtggatcatttgaggtcaggagtttgagaccagcctggccaatacggtgaaaatctctctctactaaagagtacaaaaatcagccaggcgtgggggcaggattctgtaatcccagctactccgtaagctgaggaaggagaattgcttgaacctgggaagcagaggctgcagtgagctgagatcgcaccactacactccagcctgggtgacagagtgactctgtcaaaaaaaaaaaaagaatgaatgaatgaaaaagaaaaaaaaaaggaaagagagagtgtgtgcagataatcactcaggatgttttatggtcaacctggaaggaaaaaagctcttcacagcccaaacctagatccaagtatacctagaaaatgtctcatagccatgaacccagaaagaaaactagatactgggatggaggtggggagtggggcgatgctctgaaatgttctaccacaaaggtgatcccaatcaaggtctagtgggaaaacagacatgcaaacagacacaagtgccccaagtgtcataaaatcagtaataacgatatgaatagggtgctctggacgctctgctgaaggaggtaggattttaaacatttttatcagctattggtacaatttcataaatgtgcttgaaacttaattggtttagtctattaaatttgtaattgtttttccacaaaaattgtaagcccgtgttccctaactcaaaaacagagccctgctggcaagcctggttcggcaactggaatcagagcgtgggtgtttatcaatactcgttatatgtgcttactggaacataaattcacctggaatggggatctctcagcgtgaagggattttaataggattcattcatacatttgttcaacattttataaagacatctgtccccaaaattcaatttacaatttttacaacattttacaaagactttgatctccaaatctccatttacaaattattttacaagaatttacattcattgcaaaggtttctttccagagttttttaaaggtcatttttgccttgggtccaaaactgttacttttagatgagaggagaagcagctgaggtttacatgtggagactgtgtgtgatgaaagggcaggacacagcggcccctggatcctaattcagaccagcctgcctctggcaataggaaagtcatttgttcctgcgagcccgtatcataatctggcacaactggaggttagaacaatccttaaaactctttggctgtgggattctagtttgccatcttaatttatacattctatttcggcgctgattctccagccctttcccttttaagtgatcctaattagaaaacacacaggaggatccttccaggatttaaaagctgctgggatcccctctttgatctcccatctgaaatacggacggttattgtttcgcgtttccccccactccccccgacccgcactccagtgacaattattggcattttagagcctagagatagaaataagatgtctgacaggcccggctgcctaaaaatccaaagcaagcacccctccaaacatctcccctcctccctcgcaccgttccccacccaaaaaaaaataatgaaaaggaaaaaatatagcagactctataaacagctgccaatttattaataagatgctggagttagttagaattttaaagatgcttcaggcatctttaaggaggcagcaagcccttcctctcccgggcacaaataagcccaaccagcagaccctaccttaactaccgctatttaaattctgcaaagtaccgcggtgaccggaggaaccttcgcaaaggcgcaagggtttgccttaatttggttaatacttggttgagatgccttgcgagaactcgaaagcagttgaattaagaatcttaaatctttctaggacgcggagaaggaaggtaggaaattggggagggggaaagggaggcgtgccgtcaagaaagagttgattatttatttaatttcattcaccaagggagaattcggaggctccatcccggaggcactggggtccgggacgcgggaaaggcttggaaatgtgcgacgcggctgtgtgcgaacgcgtggactaggtcttggctcgctgggagggaagggctgggccggcgctggggaggaggaagggagggaacgggtaggaggaggggaagcgcagtataaaagtcccggccggactgagcgtccgctactccgagtcacttcggtaaggcgggagcccgagcaaggtcaaggagggaagtgcgcggtgccacggaccgacacagttcgctctagcatctgacgctcggactccgcgccctcagccggatcccagagcccttccattcgccaaccgcccactgcaaggcatgagccgcacgcgggagcccgaggctgcagcgcggtcatgaggcggtggcccgggatcgacagctgcgcgacgccagcccccaaatcccctctgggcgcggcacccccgggatgagccccccacagaggcaagcccactagagctgagattcactccgagttcctgagcgcctgagccgcgggcactgcgtctctgcagcttccagccaacacctgcgcccgtgaccagacgaacgcctagagagtcggactcccctcccttcccaggctctacggggcgccgcggatccgcgaacagccgtgcccggctagcgggcggcccagcaagtgtcaagacccttcggaacgacactttggcactcctcctctcccccgactgcttcaggcaggggtcgcaggcagacgcatggcttgtccggcgccccctccgttttccatcactgcaactccagctccagtttgccaataaaggtttctaaagcagcccaggcaccaccccacccacccacagccccgagcctcagtgtgcacaagggctctacccgcgcccgtcacagcgacctcggcagcgggcacttggtacagcccggcaggctgacgctgccgccgagggcgccccggctaccgccaaaccgtgacaacctcggtgtgcccggggcccccatctggaaccggccctccccgggactccgagtgcggggcggcgcggcaggcggccccgaggagcgcggagagtagtggaggtggcttgccgggtgagtggctcggggcggcgagggcgggggcgccaagcgtggaggtaactcccggccgcagctgaagccctcctactcctcctcctcctcctcctcctcctcctcctcctcctcctccttctccttctcctcctcctcctccccgcgcttctctggcggccgctcccgctccagctgcggcgccgcggccacatctggggcgcccatgtgcgctcgggggctcggctgcgcccgccccgccgccgaccccgcagccccctgccagcagggtggcctccggcccggcccgggtcccgggctgtcccgggacccagtctccgtctccgccgccgccgccgccaggcagcgccggggcttgctccgcagccggcttggacacccccggcctcgcggtggctccgccgtggtgcggcggcggcggcggcggcggcgccggcagctcctgctcccccggccccgcacaccccgccgcgcccagcgccagccccgcgggcccgggaagcggagccctggcgggagccgaggcgggagccgcgctgccgggctcccgggctcctactcctcctcccccggcgtcaccgccgccgccgccggccgccgcgccgggtcctaaagccgcgcgtctcaaaaggatggtgcgcctggcggccgagctgctgctgctgctggggctgctgctgctcacgctgcacatcaccgtgctgcgcggctcgggagccgccgacgggcccgacgcggccgcgggcaacgccagccaagcccagctgcaggtgagtgcgccgccggagagggccgtgcgcggctgcggggacggtttgtggggcgggggtgctgagctagtgccgggtggatgcagggaggcaggtcccctgccccacctaagagcaactgttttggcagtagttttgcccgggccacttgacttaggcagaggcggagcgggggcacgtgcctggaggctgcacccggcttccaggtctgcgggctgcgctccttcagttctgtctgtcacgggtcaggtgcggggttggtggggaggtgggaaggagcgaggtttgggatgagcagaggaagtgtggagaatgtgcttgcttgggggtgctaccagtctttcgttgcccttcggaggctgagtaatgttactcgaggctggagggacgcaaggagactttataggatgatatccctgaagtctttgggagaaagaactccgggagtctacccctttaggaagcaatgccaaaggtcaggacataatttcccaaggagaatagccaggcatcccctcctcaccctcagggttcccttgcttccagtgttcctcttcctccgggagcctcgcctgaggttcccccctccccccttgtgcccccttggtcatggggaaggtgcagagtgaaggcaccggtagtgatttgggccagggttacctggggcttttaaacttgtagcaaagtctttctcccaaggatcttccccgttgaaggtcgctttagcaatgggattctgtttatccatttcaacttcagggcaaggagagggcgtagtggacggtcagacataatgtgagttctgacttaggaatagaattgcccagctaggcatttcctgccgctatgttagcgcctttccttgagtctaggggtgggacaactgtaaacttggagcataggcaaaagcaagcagggattttcccaggaggcagaggggattctctggctcctaaaatctgctcaaaccaggcgcggtggctcacgcctgtgatcccagcactttagcaggcagaggcgggtggatcacctcaggccaggtgttggagactatcctggccgacatggtgaaaccccgtctctactaaaaatacaaaaattagctgggcgtggtggcgcacgcctgtagtcccagttactcgggaggctgaggcaggagaattgcttgaacccgggaggttgtagtgagctgagatcgcgccactgcactccagcctgggcgacagagcgagactccgtctcaaaaaaaaaataaaataaaataaaataaaataaaataaataaataaataaataaaatgaaataagcattattcattgttcccaaaggcctttatattcattgtctttgataattcactttttacatctttatacaatttattgcgaaaaactttaccgtaaagagaaaactaataaaacacttccattgtgtttactacgtgccaccgttttaagtactttacagaatttaactcacttaatttaaccataatcttacaagacatggtactgttaatatagcctcatttacagatgcaaaaactgaggtacagagaggttaaaaaacttgtcaaagttcagacattccaaactcttgattacaccaaattttgtctctaccaggatagactaaagcaaggtgattattgcacgcaattacaaaacagtagaaaagtacacaccccaaagcttaaagttgttttaactttgagacatttctaaaaatgtcctaactttgtgggttctctcaccttctcccgtgggtagataagtacagtgacagactgagggaatttctatgcggaagttgaagatgccaccatcctatagactggggcacccaccaatctaacactgcggagataattcttaatatcttcaagatttctggaagttatattttatacatgatgctttctttcctcatggactcatgaaaagccataaaaatgatgttctgtggaaaagtaaatttggcagattactttatgaggtgtttgctatcattagaataacccggggttggccttttccgcttgaacagtaaggtaatgagagaagcagctggtggaagtggcagttctaaaagggaagtggactgaattctcaaaaggggctttggctgaagaactgccccaagaggacacaacaaatgggggatttagaaagagttatgctcctagaaatatcttgagtcccaagtagctgctaatccaccagcttcagcttatcttgtaatagtgttcggtgagactgtccactcaatgcacacacttttccaagcagaatgatgagtttagcagtttagttcataattttgctgttttgtaatttgttattataaaagttttatactcttcctgaccaaagttatttctttggccctctgactctctgaaggtattataagtcaaaagaagaatgttctgccaaatgaggaggtctgcaaaagacatttattagtccatcgttttcaggccccagaaagtgaatttgctagtagcaggtgtatttgaagacaaaactgtggacactgtattctttctttttaccagacattttaaacccaagtcttaaacatcatctaaatttgttggttctgtgctatcctgagctactaaaatccttcttcacaatcagaaaattaatcaatccatatacatcatttttattgtttttatctctgtgtacaaccttctaaaatataaggttgtcttagtcagaaatatgcaatggtgagtttatttacctgaattgtagtatgtttgtattcacttaaaaagggacacattcttatttaaggatatatcaaggacgcccaataaagtagtagtaagaaaagcaacaataatagttaagatttattaagtgccttttatgtggcaggcactgttcttagcactttacacatactagctttctttcttttttttttttttttttttttgagacgcagtcttgctctgtcgcccaggctggagtgcagtggcgcgatctctgctcactgcaacctccacttcccgggttcatgccattctcctgcctcagcctcccaagtagctgggactacaggcgcctgccaccacgcccggctaattttttttttttttgtatttttagtagagacggggtttcaccgtgttagccaggatggtctcactctcctgacctcatgatccgcccgccttggcctcccaaagtgctgggattacaggcgtgagccaccgcgcccggcccatactagctttcttaatcctcacaaaaatcccgggaattaggtgctatcattatccctgtttcaaaaggagaaactgaggttaggtaatttgcccaaggttgcacagctagaagcttcttcatttattttcgttattttatagtggggagctatttgaagcatatttctactgcaagttcttgataaagtcatacactcaagagagagaaaggcttttaacaatttacattttcaaatgtatcttgacagtcttactgtgttaactatgacatatatgtatatatacacatacattatatatacataatacacatatatgtataaatgttatctaactttttttgtagtttcagcgcactaggggttacatttttgactctttgtatgactgtctcccctagtatgccctagtgtgctcaaaacattaataggtacgatgttacaaggtggcagtaaaaagttttgagtacactctccatattgggtaactggctgatgaaaataaaaatgttagtctttgaatggttgtcagtatttttaaaatatctagtaagaaatgagaaaactatctgcagtagctgcattaaaatgcatggaaacatcaactttttcttgcttttgaatcttagttcattagaataagtttgtctcatattaatcagatactcagattagttctttcacatatatttaattaatgttaatgataaaacatacatagatatggatatagatatagatatataataaaagtcatctggaagacaaaatatagaatccataggcaataatagtactaataaaggtatctcctttgtctgaaattcaaatgattgcctttccactaaatctcagtcagttttagaatcatgaatttctatatatttttagtagtaagtcagaactcattaaggcagtgagatttaagcaagtattataaaacaccaatttgattatttttacaataacattaaagcaaaccaaactctcgaatgtagtaaaatgtctttgttctctgtttcctaactatcatctttatgaacactttccatcttttatccctttattgccttcagtaaaacagcttagcttcttgtattcactgctttggatttaggagttcatccaagccacttatagcagtagaagcaaaagcataatttatctgtacttaatacaagaaagtcaatagccatttgtgtttcttattttgtgacttacctgctcgttttccagtcaggctgattacttttactggaatttttttttttaatgattgacaattgtttcacttagctattgctgcagaacaaaccaccctaaaatttagtggcttaacacaaccaccattttatttcttcatgaatttgtatgacagcaccttgcttgggctcagctgagtggttcttctggtgatttcacctgatattactcatgtagctgtggccatctgttggcttcatgtgggctaggtggtccaaaaatacctcactcatttgtctgatagttggtgcttgctgtcacttaggtttgctctccatataatctctcatccttaaggagtctagctcatatatctttacatggtggactcagagcagcaagagaataaaagcagaaattgcaagacctattgatgagtttgcacaacttcatttcagctgtattctattagccaaaccatgtggttgcttagattctagtggacaagaaatagtttccacttcttgatgggaggagcagcaaagtcacattaaagaagagcatgcgtacagggaggaatcataggcatctttttatctttgttctcctaatttttgatttacatttttagaacccatagtgcaaggacataaagtgtccttttaggtgactgtatttttatcaaggtgaaactctttatctcttttattgccttttgtcttgaatacttttttgtgtcatattaatattgcaacttctgctctttcttccttttagaatttgtttgggtgtcttttccaacctttattttcaaactttttttgactttttaatttacttttttcaaatttattcatttattttgagatggagtctcactctatctcccaggctggagtgcagtggcgctatcttggctcactgcaagctccacctcctgggttcacaccattctcctgcctcagcctcccgagtagctgggactacaggcacatgccaccatgcctagctatttttttgtatttttagtggagacagggtttcaccgtgttagctaggatggtctcaatctcctgacctcatgatctgcccgcctcgacctcccaaagtgctgggattacaggtgtgagccaccatgcccagcccaacttttttctttttttttttttgagacggagtcttgctctgtcacccaggctggagtgcagtggcgcgatcttggctcacttcaaactctgcctcctggcttcacgccattctcctgcttcagcctcccgggtagctgggactacaggcgcccgccaccatgcctggctaattttttgtatttttagtagagacggggtttcaccctgttagccaggatggtctcgatctcctgacctcatgatcctctcgcctctgcctcccaaagtgctgggattacaggtgtgagccaccgcgcccggccccaactttttaatttaaatatctttcttattaataagctatattaataatgtctatcttaggaatcaattcttaccagttttattatactaccaataattatttagacttaattctaagatttacttatttctttatctagctgctgctgcctttttttttttttttttctttttgagatggagtctagctctgttgcccaggctggagtccaggagtgcagtggtgtgatctcagctcactgcaacctccctctcccgggttcaagcgattctcgtgcctcagcctcccaaatagctgggattacaggtacccaccaccatgcccggctaatttttgtatttttagtagagatggagtttcaccatgttggccaggctggtctcgaactcttcatctcaggtgatctgcccgtcctggcctcccaaaatgctgggattacaggtgtgagccactgtgcctggcctgctgctgctgcttcaatctcatactttcatcttttattttgctagaacacagtttcaaaaattttttcagagagaatttattaattataaactctataagaacctatatctttagacatatctttatttgattctcagaattaaatgctaatttggcagttggctgtcttctatcttatttcccccctaagaattttaagaatagaatttaatttttgataccatctcatatttcagatgagaagtctaataccatttctttgtaggtgatttttttaaaaacttgatgcttttatgatttttttcctttattttaatgttcggaaattttaccaggttgtgtttagattcagggctttagctgttagtcctgttcagcatatggtggaccctttcattctgaagtctaaactttgtctccagcttgaaaaaatttctttagttatatctttggtatttccaatatccctgtactctttttctggaactcctgttagagattgaaactaacattgagatttcaagatctatctttcatgtctctgaatttttcttctcatacttttatttctgttgtttaattgtgtcttatgtctcgaggcattcttctggctatttcaaccccagtgtcttgtttaggaaatatttcataactgaacgctcatagtaaatatcagatgcaaatgtcaaactcaaccactctgaaacccaggactgaatgaaatagctctaccacttcctgccctcagccttttctcctaaattctatagcctcttttctccccttctttttctttccctttctttcctttttcttccttttttatcttcctttcctttctttttccttatctttcttctcttctctctctctctctttctgcattttttaaagttttttaaaactacatataaattacatgcaataaaatggatgaatcttaagggttcagtttcatttttgacagttgtatatgcctatatagttaccaccaaaattaggatatagaacattccccatcaccccagaaagtcttctagtgcacaattgtaggcaatttgctccttccagaggcaaccaatttctggcttccattaccgtagattagttttgcctgttccagagtttcacataaatggaaatgtactttttgcatttttccatgtgcctggcttctctcattaaactaagtttttgagattcatttattttgtgtgtatcagtagatttctctcttttattgctaaatgatagtccactgtgtaactctatcacaatttgtatatccccatcaatggacatttggtttgtttccattgctttgcatattatgagtaagaccatgttagtattcttacacaagcctttctgtggacctatgttttcatttcttgtgagtaaatttctagtagtaaggctgacatagtctctgttcttgatagtattgtggtaattcttctagggaaactgactttttagagatctcactttccttttctcacctctgtagtgcttcactttcaattggttgccacttgtttcatatctaccagaaatccctctctctcttctgttggcccttctttcagctttccaattctgttgtggattgactcatatttcttctacctcctccatagaattaataaatagaaaagaggtaaacgccaccttggtcggccaccttgagctcaagcactataattctatttcttaattttattttcctttatataaaccaaaataaagttctatcatttgtgctgttccttcatttattcacttctactcatagtttaaaaggcattaatctttgaggtttgggggcatcctcagatgtctattcatttggtcaagaagaatctgttttggttttaatgcctccaaagcaaataatctcaataacattttccatatgtcatacaagtgttttttaacaactcttaatatcagaacatttttcctctgatatgcccattaaatcttttacgctacatgttaatttcatgttcactttgttcacttttttttcttcccagagttcatgaacaggtggctgctctcttttcaagaaacttctcctgtagaacttgaagattattatgtaatagttcctttgtcgtctccaaattccattatctcagtttctttaacttgtcttcattagtcttattgtaaaacattttagtgctttctgtggttctattatttctctctcatcttctgagagcatctttcttttgcaacccttggcttagggtttacaaattttaccctttacaaattttatgatttgtaaagaaaagaatgacaatgaagccccttaggtcctcaatgacagctaagagtgtccctctgtctctactcatcccccaaagacaggagataatttagagatgggatgggggtgtcggtttagtgcccagattatatgtagtgagttcaaacaaacagcaagggaatgtgttgtagaaaaaaaaagaaaagaaaagaaaaaaaaacctcactttgcattttatttaaaccttatacaattcctttttataagaattataagaaactgtgaacataaatacgtaaaacctaatttctttctttctgtggcttatcagtcaagaggttagatcaagtccagtgctgacaaaaccaatatgcttattatgcccagtgtttctcttgggactaagcactcactgcccattgtggtccctgacttgataatgtacccttctggctctttctcttccctgccttcctccctcttcgcctaccagagatttctggggtcatctctcaaataaattacttgttctttgtctcagggcctgcttctaggaaaacccacactaagtgaaccacacccaaatggtagtcatggtaataatggatactcctctaggtagcaacaatacaggaagtctccagaagggtaacagagcagagtttccatgaggcccctgcttgttgttgtcattaacagcgaggaagtctgttagcctcagagagatgtgctgcaggcagcaaaagaaccaggctaccccatgccctcccggagcagtcaggaagagggaaattccaaaattacagagatgggctgcaaaggtcacgcctaggcaaagcctacaaattcctggtgtttagagatctaatgggtcctttttctcctgagatgctgatcccatggtcctttactatcttaggtgggaggatgagtaacaatggggaggcctcagaggcgtgtgggattgtcatctactccctgtgaggcatcaactccctgagcacagaccagcacgtgtccctggaaagttatttttgtaaaccgagtagaagtaaaaacagtaggttaactaccccttcttcctgttggcctgactcatgcacattttagtaaacccaatcatcttgcacagagcactctctatggctgacacacatccattagacagcaacacccacattccccatggaagagatagtactgcgaggttcatggaatagaagagttctgtcttcaagtttgggtctctgagctgcctgatttgcagttttgagtaccccaatcaccaaatattcaagagcagtgacctggaaaaggtcaggtaggctttgaatgcgatgggccattgatgtcatctggacaccacttatctattttcaaaaataacaaagtatgtccaaaatctgtatgaagaatgcagagaaggtggaaatggtcatagcctgccccagtgttaacttcctcccataagcatccaggtagaatattttcaccaaggacaaagaaacaaataacagacatgccttgcctcacaggtaaccctgggagatggcagtgaggacaggaggagaagagtggcagtcattttattattatttttttaaatacagctttgttgaagtgcaattgacaactaataaactgtacatatttaaatgaaaaatttgacaatactgacacctgtaaaaccatcaccatagtcaagatgatgaataaatctaccatctgaaaagtttccttgtgctcctctgtgagcttcagcaatctccaagcaaccactgatctgccttctctcactgtagattagtgttggatttcctagacttttatataagtggaatacagaatgcatagcattgcatgatatggctttttgctcatgttgagattcattcatgttgttctgtgcatagataatttgttcctttttattaccaattaatattctattgtgtggatataccaccatatgtttacccattgacccatttaggttatttcctatttggcaactattaaagatgctgtgaacattcaggtataagcctttgtgtgaacatttgctttcatttctcttgggtgaatactttggagcagaatggttggatcatatagcagttgtatgtttagcttattaagaaattctggaaatctttttggtgcactcacataaagtgtttaggatctacaacaatccaggtactcccttggaaaacttcacagcatttgaaggttgaatcccaggatgatatttttcttggttaaaatgtaagtgtatgaactacagtatattatgaaatactgaaagaaggagagaagatactgtctccttagaaggaattctcctttcttttcagaatgcccaaagtagtctcatgggtctcgattctccaagtgatggtggtgacagacattgattgtagtgaccatcatggtgggggttgtgaaaagaaaattcgatgctggaccaaaaaaaaaaaagaaaacaggccggaaaagtgtcccagaagaaaactctacttctcccgtgtcctgctgtccaatattccttgattctcttgccccattccttgtccccatgagtggaaattaagaaaaccagaaatagatttcgtatctcctgcctggggcctcaattacattgtgacatagaaacctggtatggattttgagctcaacatgaattggaagccaagtttattgctgggaatcttcaaatttcagggagtaggaagagcaaaaataaaaatggagatcctgccgggcgcggtggctcatgcctgtaatcctagcactttgagaggccaaggcgggtggatcacctgaggtcgggagttcgagaccagcctgaccaacatggagaaaccccatctctactgacaatacaaaattagccgggcgtggtggtgcattcctgtaatcccagctactcgggaggctgaggcaggaaaattgcttgaaccagggagctagaggttgcaatgagccaagactgtgctattgcattcctgcctgggcaacaagagcgaaactccatctcaaaaaaaaaaaaaaaaaaaggagatcccattagatgttcctaattcttagcccaagaaatgaattgaggaaattctgaccttctgggcacatgggacataggaaaatacagattgttagtgactcacataggattctcattatgagggaaaatactgtccttctcttacacataaggtaacccatccattgcccaaatgttcactaggtgcattcatggcccagagatagacaagaagctcagaatggcttctcagcccttgcgcccagaatgcgatctacagaccaccagtattagcatctcctgaaagcttgttataaaataagagttttaagccatgcccagaactactgaatcagaatctgcattttaaaaatgtttacttatatatattttgggggtacaggtgcaggtttcttaggtgcgtatattgtgtagtagtgaagtctgggcttttagtgtactcatcacctgagtagtgaatattgtacccagtgagtaatttttcagccctcatcccctccacctcccaccttttggagtccccagtgtctgattactctttgtatgtccgtgtatgcccattgtttagcccccacttataagggagaacgtggtattcgactttctgtttctgagttattttgcttagcataatggcctccggtaccagccatgttgctgcgagagacatgacttcattcttttttatgtctaagtagtattccatggtatatttctttacccagtcttccactgatggacatttaggttgattccatgtctttgctgttgtgaatagtgctgtgatataaacagatgagtgcgggtatctttttgatgtattgatttctttccctttgggtatatactcaggagtgggattgctggattgaatggtagttctctttttggtactttgagaaatctccatactgttttctataaaggttgtgcttatttacattcccaccaacagtgtataagtgtgcccttttagccatgtcctcgccaacatatgttgcttttagattttttaacaatagctattctgacttgtgtaaaatggtatctcattgtggttttaatttttatttctctgataattagttatgtaaagcattttttcatatgtttgttgtcctcttgtatgtcttcttttgaaaaatgcctgttcatgtcctttgtcgactttttaacgaggtcatttggttttttcttgctgagttgtttgagttccttgtggattctgtatgttagccctttatcagatgcaaatattttttgcatctgatagtttgcaaatattttttcctacagaatctgtattttgacaaggtccccagattaatcatatgcaggtcatggtttgagaaacactggtctacatgcatgtttttcttgcaagttgcaggtcccagaaagcacttaatacaggtcctgtgttatccagctattgcctaataataatgctgtaggacaactactccaaatctcaacggtctgcaattataagcatgtactctcacactcatgggtccatgggtcagctgaggttcagtagatctaggcagggcatggctttaagctatggattgggtctaggtttacactatgggtctcccattcttttgtgaccagcaggttacctgccacacatttctctcatggtgatgggattacacatcagtcatatctgttaccatttcatcagccaaagcaagtcacaagatccaacagactagccaaaaagtggtcatgggctttggagttgttttgattccagttctgctcctcagttaagtctctgcccctaagcaaaatccttacacttctctacatctctgtgtcccattcagtaaaatgggataagaatagttaacatcaccagggctgtgttgagaagctgctcagcctggctgtgtggccagagtcaggccaagagaaagggtgagtcccagagggccctgccactgagaagttagagctggagaaagctctcacatgtcatcctatgggttgctctggcagcacatgattcggcccccaccaagggttgtttctgagtcaagaaacacatgcccatcactttccatcttttttcagaatggttgtcctttcactgcttacaaattgtgtgctacatggtaggaactgtgcctgcaaatacgttattcatcactcacggggcttggacaatataagcctgcgaccactttccctgatgaaagggcaccgtttcctaccttccttccccagatgcaacaagagaaacagaacatgcctggggacaggagttccaaagctctgtgcatagtatattgtacttcccttttttcttttttttgaaatggagtctcattgtgtcacccaggctggagtgcagtgatgcaatcttggctcactgcaacctccacctcctgggttcaagcaagtctactgcctcagcctcctgagtagctgggattacaggcacccaccaccacgcacggctaatttttatatttttagtagagacggggtttcaccatgttggccagaatggtctcgatctcttaaccttgtgatccacccacctcggcctcccaaagtgctgggattacagtcgtgagccaatgtgcccgtctcggccatccttctaacaaggacctgctcagagttacaattcttaggagtaatacagtagaagacaattatgttaacaaacttctcacctttccaactaatgctgggatattcattgagttagcatgggaaagactggcacccatgattcaattgcctccacctgggtccttcccacaacacatgggaattctgggagaaacaattcggttgagatttgattggggacacaaccaagtcatatcattccaccccggcccctccaaatttcatgtcctaacatttcaaaaccaatcatgccttcccaacagtcccccaaaggcttaatttatttcagaattaacccaaaagtccacagtccaaagtctcatctgagacaaggcaagtaccttctgcctatgagcctgtaaaatcaaaagcaagctagttacttcctagatacaatgggggtacaggtattgggtaaatacagtcattccaaatgggagaaactggccaaaacagagggattacagggcccaggcaagtctgaaatccagcagggcagttaaattttaaagctccaaaatgatcttctttgactccaggtctcacatcaaggtgacactgatgcaagaggtgggttcccatggtcttgggcagctctgcccccggggctttgcagggtacagcctccctccagctgctttcaggggctggcattgagtgtctgcagcttttccaggcacatggtgcaagctgtcggtagatctaccattctgggatctggaggacagtggccctcttctcacagctccactaggcagtgcccaagtagggactctgtgtgggggctccggtcccacatttcccttctgcactgccctagaagaggttcttcatgaggaccctgcccctgcagcacacatgaagtccctcccacaacacatgagaattctgggagatacaattcaattgagatttgaatggggacacagccaacatatcaacatgcccttggcccagcaattccacctgagtatgtgcccaacagaaatctattcactaatgcactcaaagacctaaaaaataatgttcatagcagcactgtttaaaatggccccaaccttgaaacaaccccaatgccatcaacagaatggataataaggtagttaagtgtacacagtgggaatgaacaaatgacaactatatgcaacatgcacaatttcacaaatgtaatgttgagtgaaggaaaccaggcacagtaaagtacatgctggataattctgtttaggtaaagttcaaaaccaggaaaaaggaacctgtgctgttggaagagagttacctttgtcagggaagtgatgaaaagggagtccaaggagggcagctagggtgctggtaatgttttgcctcttgatctaggcattggttgcctaggtgtcttcagtttgtgaaatctcattgagttgtagagttatatatgtgtatatttctgtaggaatatcatacttcaattttaataaaagagtaaagaatgcagcaggcagggtacatggtgtagaagagatggctgattttcactgggaaagattacccacagccctggagttcactctctgggctccctgatgtgcgtactatcccacagattgttctccaaattagaatgaatgcaggctggtttcagtattatgggggtgctcctctgcctcaggtcccagtgccattgttacaacatcaaagaccaactgctggctgagatgcggtccatatgaaaagagtgaccagcaaatttactgcttgacttcattccccttaaaaggaactggctccatggtcctccttcaaagctcaattgtagacatatatcttctttataggacatcgtttacaataaagaggagcaataacttaaaatttaaaaaaaagaatacttttgagagcactgtgaggtggacattccatttaataaacatcactgtggttacattgcccaaacattcccagaagtccagccatgggcctgagagacttctactggacatggtgacttttggggactaatttgaattatatttttatgctctagccctctccctaggctctgaaagttcttgagaaggtcattaatgagaggcaatctacttcaaaccagagggccacctcactaaaatcaggcaaaatggcaaaattcatagcccattactcattaacttatttggagctgcccttcagtagggtaaacatttttttaagggttggggccaaattaaactcctggatcgattatacatagttccccaatacccacatggacatcactccacataattccagtgtgaaaatctcacagacttattagcatttccagatactagaactcaactagaaaacaacaaagttgtttttatgcctatcagaaaatgaagaatgttattaactttccaagaaggaaaaaagtaaaattatttataatatacaggatgtttttggcttcacatggagtctgacccaggtggtggagaaagtcacatctacgatcaaaatgaccagcctcctgaaaactgaccaatccagaataatcctttcaggttcactcatgatagcagttgatcagcccatagaggatacaacgttctaaagagtgggcaagtcatccacttctgtttaacccattactcctgaaaaggttcagctctccatactttgctggaaaaaggctaacaactcagtgcatccttccctctctgctcccctcactggtacattcaggaagacacgaaccaggtgagacaactgagagctccttactgagagtgtgaagtgtgatggtggcacaacatgcaattccgaagacatcatgaaatgagataaatctggggaatccacatcaactagaaaaaaactggaaacatttgaagaggcattgggatcacaaagagagtgaatctaaacattgaacagcaggtattaaatagaaataatgaaaggcaagttctcaggaaaaaatctgtggcagactaggtattcgaagttctgttccaggttctccccagggactcattgccctgaaactctgtctggtgtggttctctcatgccccacaatggttctttcacttcttattcaccaaggccaggattaatgctaaggtctggacgaacccaataatgggcatgaatggccttggccttaagttttcagggatccatctgcagggtcctccctgagatctgagaagggttttacttacttctttcatcttaaggtgaatgctagtgggggaattattgtggtgtgccccaagaacgttctgtgtcttggtcctgacaatctacatgaagtaccttttgtgccaccaggatacgtgggcacatgacaggtactcacatacacaagggtcactgcacatggctgcaggaatgcccaggttggaccggggcttcatctgtgctccaacccacctgcactccatggtgaggcactctgtttagaaggcaggttgcagacactcaccaaattctagaatgttgttgtaggcaagaaagccaagccccaatgtctcatttcattgacaaagaatctaaaacctggagaaattaaaagatttggctaagaccataccattcatttatcctacagccagtaccagactccaaagcaagtcatctttcatgaagccacacaatcccccatttctgaacatctgtaaaagtttttatagccccacttagctaaagagaattagagtaagtgtacatctaaagtgctgggatcctgctacatggtggttgctcttaggttgttacaggagcagaaaggtaattaaatggacatgaattgtctcttttatttaatatacaaccaaactgcagtaaggcaaatgaaataatgtacatataagcattgagcactgcccagccacatggcattctacaattccattcattcattcagcactttcatatcgcgtggctgtgatcagcagatattgtgctaggcactggagattcaatagagaacaagcttatgttctagaaagaaaactgacaataattgattcagaataaaggaattattatagattgtgataggtgcttagcaggacataaacagggagcaaaagatagggaataactgggagttcctactaaaagagggtggtcaaggaaggacttgatggaaaagtgacacttgagtcctgagctgggggaataaaaggaccagctctgcaaagaactcaggagagccagtcaggcagacggaatcacaaacaccaaagccttgagataggaaggactttggcatgactaagggatggaaaagagactggagaacagtgtgtaaggaagaaagtggcacatgaacttgcagaaaaaagcaaggattttgcaggtcatgataaagaatatggctgttctaggattggtgaggaagcagccattgaagagcttctaaatgatggctccatctgatcagtggataatgagagggaagaacatagatatgttagaaaatttcacaataattcaggtaagaggtgatgggatgtggaccagggtagagaagagtggatggatgcaaggcacagttctgagacagagccaacaggatatgctgttggattgcatttcagagttaagaagtgaagagtcaaagacagcttccagtttcacaagggtagagttcatgtcagtggatttatatgggacatgtggaatatgagatgcctctgggacatgtaagtgaagataatagcagggaggctgtgaagtggacagggagctgagagtgaggtgtcatgatgaaagtggtaaaaggagaaccaagaggtgtgtcacagaagccaggggagaagaatgccttaaggagagaggacttctatcgaatgctgctgtgagaacaaaaaagatgaggccagagaagtgctcattcaactgggcaacgcagccatgactggtgacctgaatgaggtcaccaactgctctgcagttgcagaggcatcatgggaacagactccagtgtctattgggtaaaggaacaaatggaaggtgaggaaatggagacagaatatacaaataagtcttgcaaaagttttactataaaaaggggagatatatgaacatgtggtcaaaaaagagtttttggttcatgtaagatcagagataccagggcatctgtgaggctgatgagaacgatccaatagaaagggagagattgatgatgcaaaactgagagaggagaaatgaggagtgaattcttcaagaaggcaaggggctatgtgtgagcattggcctttcacagaagcaggaaagcttgttctgtgtaacaattgggaagagaaagaaaatgagctatgcagacaggagtataaatagagtgatggtaataaaagagttaccatctcatgactcctgttccatcagtgaaatatgaagtgagggcaggagcacaagtaggacgtttgaggagagaagatataaaatggtcatcttggatactggagcaagtaaggttgtgaaggaagggcagttggattttggaacagtgcttagtattcatttgagggtttgaggacatgaatctaaaataaagcaagtttgtcaagttggatgcttttattgttcccatcacccacctgcttggctactaacctacagaagttggatcactgagttcaaccaaaatggaggtgttgccagtcaaatatataaggagaagagaaaggggcaagcagagttgagggccgttgcaaggaaatgattaaaataaaagaacacttgttgaagaaggaaagtaaaaacaagagaaggctgaagggaggtgagaaaatggcagtggcttggagatctcaatgagttttaaaactggaaaaatgagttaaaagaatggaaagtgtctttatgtagaaggtttactgacaaaaggtctagggaagagggtggttgagatgcagtagagggaaagggtatgggaggtgaggaggtccaagaactggggaggtcatctacatggatgttgaagtcaccaaaaaggacaacaggaggtcaatggtaaagaagactaagccagaagctgggcttttagatgaacggagaatgaccagaaactccacagagcagttggaacatccagcatcttgaaaggagcaggatttgtttgttcagtttttgtttttatttttcaggaggaaggggaagaaaaagtcaggagttagccatggaaccaagaagatccaggagaaggttgaggggatgttcagagaagtggaaaatgagagattgattatcatggaggaaaagcccgagaaggtccagtaaaaggtttgggaaggtgaaggaggacaggctgagtccaattaagtgttcagagatgtgtagaatggagagcctggtctcttgatggcagctgggggagccatgatgggaatggtcctgcacttctcttgaatggaggtgagactctttgctcattggcatgatggcttctaggctgttgtttctatgcttattaaggttggtataaaagcatcagatgaggggtaggaattacttgagccttgataggtgaggttggcagccatagcttaagacatcgggttccttactgttcatgtgtgaagtagtgggagctggtagttatacagatttcacctgattttatctacttgtttttgtcatatacttaaatagtccctactgtgggccagacacttttttaagcatttgattaatattgacttatttaaccgtcaaaacaacaccttgaggtaggcattattgttatcctcattttacacaataaggttaagtaccttgtccaagtcacacagatagcagaggtagaggcaagatttgaactttggctgtctggacaccagagtccatgcttttaatcactgtgactgcgtggcttggggaagaagttccttgtctattaccaaaaaagaactcttgccttggaattcagaagacataactttgagtccctactctgtcactaactggctgtgaccatgggcacaacatttaacatctttcaccctcagctttcttagtggtcagttccatgcagtcattcagggacccaggatgatggaggccctgatgtcttcttagcagtcccagctcagaagtgacacacatcacttctgctcacatagatcatcctttgatgcgggatgacttggaaatgtattccctgataagggttgcctccagcttggcacaaagacacgtatttttggtagaaagctagccctctctgcctcattactcaatatggcttatgcttttaagattctgcagtgttccacacttagggctgtcctcttagctgtttgtcttattcctgcttgacctctaggtctctcttattataaaagcagtaaaacgaccatctgaatgccattgactgccatgcatcccctcacttttcaaatataagctatgaataaaaaaaaattagcccttcactaatgccaaaacctagggaagaaattaagcatgcccaatattttaagctatatccatcaccgttaagcatctgtttgcactatgtctatccattaactaatcagcaaaacatggtttcagtaggaattgttacaacccatttgatatggaatgacaagacttagaggttcagagtatttctgcagttagaatagcaggcacagttttcctgaaatagatatttgaagggaagatggaattgtttctcaattttccacataatatgtttgcttagtggaatgaggatagacctcaatgctcatggtatttgcagaagggagtgtttgtctattaccacatctccagtgtaggcactggtgattcatctgcaggtcagaaagagagccctgttagccagtttaggaaggtcacatttatagacaaatccaaacaaggtactttgctatcctctcttttgttcacagacagacaagataaacctaggcagagagaaaacttgcctcaatcttggattaaatgcagaggtctgcttgaacattccaaggtcaaactaaaagtctacaagagcaggagacttgattcaaaacagctcgtctctgactggttttcatgtgggcagaggggactctctcgacactaagatgaccacagctcacatagaggtgtcagctgaaatatggaggattaccactactgtagaagatgtcctatgcaaaaaaaaaaaaaaccagcataagctaatgaaaatatatagtggtcacttattcggacattacatgtcctcaagtcctacaaattatttggtaaggcagctttgtgatttgttttcacacagcaagatgactagtgaaaagaatttaatgataagcaaacacattgcatataaaaacatattaaagatacttatttagcatgaaggcttattccagttcacaggcatggtattacctttactatatacttccataatttaaacacagataaggagataatgtggtttcttcaaaatccctggccaggttttgaccacattttctattgagaagacatgtcccccttttcattcccctagaagcaaactacctatgcacaagtcaaaagtgagtaaaatgtgtaaaagggaaaggtgtgtttcacctaagtgtcatattcagaaacatctgctttgcctggtgtatatggcattaatttcctgccagttttctattggaaggcccttctgagtcttctgaaattgaacatcaggtcatgtttctttaatcaaccttggaaacaatgaaagaaaggagtggtggagaggtttctttttataaaatgttcctaaagtcaaaaaagtctagaagaaagaacatgcacaactttggaccatgagtctgggattttaataccaaaaagcacttattccctgccaccccatgttggttaaatatcttccttccttcttgtattggttatctattgctgtataacaaattaccctatacttatgctaccccgtagctgctcaaaagaacacacgtttattatctcagaacttccatgggtccggaattcagacacagcttacctggatcccttggcccatggtctctcacaggctacagtaaaggtagccctcagttccttgccatgtgggcctctccgtggtgcagctctcaggatggcagcagaatttatcagagcaggtaagtgaataaagccagaaaaagagtatgagcaagacaaaatccacagtctttgtcacctaatctcagtgacattccatcatgtttgccataccctatttgtcagaagcaagtcgtttgctccatcccacactcaaagggaggggattgcacaaggctgtgtattccaggagatggggtcattgagggccatttcagaagctgcctgccatactcccctccacatgtacctgcccattcctgtgtgtcccaatagtgatagttcccctgcacactctagtgtagttacatgggtccttacttttccagatttccttaattccttcattttatttcatttctcatttctctcctttcatgtcaattcaaaataatacttagtttcatcttctaaactgttgctctcctctgctcacaaacttccaatcattcccctttccatgactcaaaacagatactgaggaactccatatctggaactgacccacctttcctgctcctcaatttataggctgcattttcagccaaattagactctcactattccttgtacccgcccactccgatgttctttgccctctttccggttgcaaaaattctggacaggccacaaaagcttttctgtgggctgggcgctgtggctcacgcctataatcccagcactttgagagactgaggtgggcagatcacttgaagtcaggcgttcaagaccagctggccaacatggtgaaaccccgtctctactgaaaatacacaaaaaagaattagtcgggcatggtggcacacacctgtaatcccagctactcgggaggctgaggcagcagaatcacttgaacccaggaggcggaggttgcagtgagccaagatcatgccactgcactttagcctgggcaacacagcgagactccatctcaaaaaaaaaaaaaaagcttttctgtgaactgtcgaggtagaaatgggcccacttctgaaccctcacagcatggttcatccactgagtgaatattgcattcttcctgctccctgcctatctgtgggtacgaagcatccctactgcccactctgcctgccaggacagaggaagggccatgtgaccagcaactgtagcttactcctctgttatacccatggcatgcagtgtagctacttgcatatggaaagtgcccaagaaagtctggaaggtcagggagtgtcgtgctttccaaaatgccttcaccacatttaaggaggcagagcagatacgtgttttttcattttatagatgagaaacctgagacccggaaagtttacctacttgcctgaaatggacaatggcaaagccatgattaaattcccaagttctaagaccttgtccaatcccccagtgccctggccttataagaagaaagtaactgatttgggattctccattcataccttttcttttttcttttcaatgtaaaaccacctgactgaacttggtttttaataaagcaatttagagtcacttgataactcctgcattgtaattaatatccttctctcttttttttttaaaccattccaggggaaagaagggagcaagacagagatttaaaaatatatatatgtatagtgccgggcccagtggctcaggcctgtaatcccagcactttgggaggctgaggcgggtggatcacctgagatcaggagttagagaccagtctggccaacatggtgaaaccccgtctctactgaaaatacaaagccaggtgtggtggcacatgcttgtaatcccagctacttgggaggctgaggcaggagaatcacttgaacctgggaggcagaggtttcagtgagccgagatcgcaccattgcactccagcctgggcaaaaaaatgtgaatctccgtctcaaaaaaaaaataagaagagatttagagacagaaagagggcctgggtctgcaatttcttgttcttctgtgaagtaaacttttcaacttaccaaaaacacagcatcaggaaatgttgtgtctttaagtgtcagcgtgtcccttcctgacccctgattcatgtctgcccatctgatgaagttatcagtggcttgcagcctgtacaggtcaggagggttccaatgacccaggacaccttcgccggatgctgtggctgaaaccacagcatttctggcagcaaagtgaggggtgtgtgtgtgtgtgtgtgtgtgtgtgtgtgtgtgtgtgtgtaggtaggtaggaggagcaacttaaaagagagactttagcatgagggatgattatttctcaaaacccaccatctaggcctctgtaggcaatattctgaattcaaaatgactttcagccaagtcgtgtttgcacctgggaactgtgagaagtattgaaagcttcataaaggagaggaaacctgaccacgacaggaagtgacttacagcccctgaggctcagatgtattgacataaggtagtgaagtaggaaagaattacggttttcaaaaagaagtaggatcttggtttctcttttatcccagtgtgatgtgtgtgtcctagaacaaaatcctctaaccacagtgcaaaagtgacattcatgcaacaggagtggtctaaatcccttgcctttgtgggtctgatacagaggaaagtcagaatttcctctatgacttgttcatcgtgtgtcagtgttgtggtttccaagtgctgtgcaaacctgattttccaagttccaggtgggctatgtgggtgatggcagcgtccaaaagtgcggaagaaatgagctaaagccagcaagttacttggagactgaggttgtggctgcccgattcatagtagtacatttctttgtgtgcacaaattgtcagatattcttattctctagcatttcttgttgcttgattcttctttatgaacatttcttgttgctccacttgaagcaacaagggatctgatatccagcagcaggtgagtatacaaaaagctgagtatgaactgcattgctggtgtgtgaactgtcttggaagaaccatgtcactggaaaatttgatattcttttgaaaagatgatgggccttaccagtgagatgtctccactccagaggaagctatttttttaatgcaacaccttgcctgacatactgcttcaagatcaatctcaggagaatcttgagtgtagcaaaagcattctgcaccatttcccagcaagtgatttcataataaataagaccattgaactttacctcttgagccaggcctcataatactaatttctaccagtgttcttcacatgtagctggggtgaaatgtgctcagtttgttttcccctttcagttcacttcttttcgtctccttcatccaaaacccagtgttagagggacagtttgaaacaacctgaagggatggcatatgatgacttttgaggccgttcccttgatccccagatgtttccctgttctgcatgacctgccatttgggggtgagcgggggaagccagtggaataaatatatttctatctgcaaaaccgagcactggctttgaattaacatgaagggacaaatggaaagcaaggtgaaagtatatgatgtaagagagttgatcaacatgaaaatactggtagaaagtgctgtaacttcttaagcggcttgtacaggagaaaaagctgtttatctttaggtaagattggctaaacatcgtgggccaagttcaggccccacgtacatgtggtcaggtcaggagccctgcaaagaacctgttgcctttatccaaatattactcattgttgggtggaattttttaggatgatttttgaaaagataaataaaataaggacacaaagatctggggggaaaaagccaaatctcacgggaatcagggttcctaatgatcttctgttctccccaccactgaaaggtactgaaaacaggcagaagggagatcagctgcgagcctgcccatttcacagatggaacagggctgaggagctggtgcagccattccaggccagcatcccctgcctcccacccctagttctgccagcagaccactgccgccagacatgaaacacgggcaggccaactggaacccttccgtgccccaggtggacagacatggcaggaccacacggagtccattcttctccagcaaagtagtgatgtgttccaggcaaaagcccaatcgaggatgttttggcccaaaggaaacatttacaaccaaattatacacctcggaaaataaacgagctttcattttggaaggaaaccccgccaggctctttattatttacaccacagtcataaagttggttttaatctctgtagtggaatgctgctgaattggccaactggcaggctctggtggttcgagtggggaccactttgcctttcggaacacacaatgggaagccaaaggaagtacttctcctgaaccatttttctcagcctccatcattttttgttgcgttttgttttgttttgttttgttttgttttgttttgttttgttttgttttgttttgtttcctggcatgttcattacaactttaaagcagactcctttctgcactctcttttccttttttctcatttgcaaaaattgctggggccttccagaaaaaggcttaatgtaatgtttcctttccaaattgatgaaaatccaggaggaggcccaagaaagtctataatggatttccatcgatcgcttccaggggaactggatataaaagctcacagtgaacagaagggaagagctatcatgcatgttctctttttctaccttaacaaagaaatctggagatggaaaactgctggtagtctgctcccagggttcatgccatgaaacgaccacgttgatagggtagccaggaggcttaggatttctgggatggcctaggtttcaaatattttataccattatcagattatacactgggtactgtgtccaattttaggtttggaataaagagggcccctactagctttcaaggatgtggctgggtgctttcagttaggaaactcctttgataaggctcagagtcgattcagcttgcggagaatttcacacgtactgaagacgtgagaatgaagtccttgggggcatatggagttttagcaaacagagcaggaaaagagcgagtaatgggcaaggcttttgtcctcattgattgggcaaaccatggcaacacagttaagcatgccaggcagcttccaaaacttgctgcacattggaatcgcctggggatctttttaaggtcctggtgcctggacccttccccagactccctgtctgatttatatggtttgggatgtgactgaggcatcaggatgtacatttgggaacccctgctgtggattgtaagctccatgagggtaagattcgtgtctatcttgctccctattgtatttccagtctttggaacggagtaattggctctcagtaattacatattgaatgagtaaatggatacatgccctgcagctcatctgcccacacaccatcaaaatgaatcccagctaattaggtgatttcagcttttaagtatgttgggtggtttgggatgagtgtggcttacattctaggtctcctttgcccccatctattttaccctctgcttctccctactgaaaacatcctgagaattattttatcatctcttcttaggccacttttaatattcatgacctggaaattttataacttatgaccattgattgctttgtattttccataagtcaggaatttataccttagctgttctgctccttggatttctgcctccctccctataatactttaattattcagagatcaatccagtcatttttggcctgcaaagccctggggatttctttcacccagtagttgaatggtgagcacttgtcctctccttctgatgttgaaggttttcacttcccgctccctgcttccattccatctcaccccccttccacaggcattgaattctggcagtggataagtcagcttttattgtaaaaatgtttatggagactgtcagttcttaaccttcaaactgaaccatgctgtttgtatttttccaagtgatggagagtgtgaaggactaatgaaaatggagcgtgaagagatcaaacatgcgtcgtggaatctctgttcaaaacccagaatgggagaaagtccactttgcaggggaaggcagaattctggggatggatcctctgtgagtcaggctcagggcctgagatcatgatctggcatgagagaaagtgaggtgcagggagcaaggggaccagcgtggtatgtgggaggtagagatcataagactttctctttggagaagctagagctagaaatatatttcctttggtcagagagcaagcaagagttgcaacagactctatcttctgaccttctcaagcctgctttcaaaagtcaggatgttgaaagaagccattcataagtttgtatagcatgccatgttggagaactttttgcttaccgtgtgacttttctgtacgccactggggagggtgagcacttagaacttggagccgaactcttagtaactgaatacccaggactctggttaaaaatgggtttggctctaccttaaaagtcaatctgtatatctgcagacttggggagtaagtgagagagtccaagctgaagcaagcaagcaaatgacattttcacaggctgaggtataaatttgctggaggaaagcaaagctctggttgctacatgagctttccagttgggggctgtgagatttatctgaaaagagcattttcttgggttggattcttggcagcagttggccctgtctacggagccttaagacacaagagtgtgaatggatccctcaggcctcttttctggaagatgtccctggaagagcaacgagcaagtgcacaagggagatggtgaatgaatgcagctcaggaagttatgctttttccttggagtagggaccatttggctttgatgatggctgctgtgtacatgctgggaacaattagattgtccttcttcaccttcatacatgaatcattgctttaatcaggaaaagtaaaagttaggtgttggatggtctgagatttatccttgctgatgggttcatcgtggggaggcttttgcagcatcagagagcttttcagtataaaggggcgccatcttggctgggcacagtggctcacacctgtaatcccagcactttgggaggccaaggcaggcggatcatttgaggtctggagttcaagaccagcctgaccaacatggtgaaaccccgtctctactaaaaatacaaaaatacattagctgggtgtggtggcgtgcacctgtagtcccagatactcaggaggctgaggcaggagaatcgcttgaacacgggagacagaggttacagtgggccaagactgcaccacttgcactccagcttgggcaacagagcgagactctgtctcaaaaaaaaaaagaggagccatcttaaaaccatgatgatagtaacttggcctttggggcaactgaaggaaactgtttttctccactctctcttgtctctcaccttctgtcttcccacttctctcatttactgacagataatttctcctctctcttaggcccacctggggtccccagccccccctctcagatctcacttaatcttctgccagacctctgagctagaaaagtttatctcatccattagccaatctggaaccaacctgtccttccccatggacctgtgtggcttaattagagacagacacacagcgagggagaaatcagttggaggcctgttgctgctccatttggggtacttgctacccaagcagacctggcaaagctagcatttattggcacagggaaaagcaggaaggaaccaagtctcacagttcatcctccaccttcagggtttttgatcttctcaccctgcgtgttgatctcttatgtcacttgctcagtgtgcagcttccttcacccagggacccagagggtgaggagctctgccttccctcacggtgttatcataggggcattcctgaggagtgggtgaccactcagagggtctccccatgctggatgggaggccttggagctcattcgctgttgatctgattgtgcttttccaagataaaagtgcactctttgagagcgctgtgtttcctggaaagcatctcccattgccaaagtaccattcagaatgatagctccttaccgactatcagccactgttcctcaccttctcttggtgagagcagaggttctcagatgtgagcctgcagagaatcgccaggaggccttgctcaaacacctgctgctgggccccaccccagaagctctgattccacaggggataggacccgagaatcagcattttaaacacatttccaggcgattccaacactgctggcctggggcccccattttgagaacacatgaattaaattaataactcagtatcattatcagtttttctgtgagctcagctaggaaacaatgggctagttcagatatcttaaaatttaaaaaaaagctaaaattaaaataacacatacacatccatatccatatatatatatatatgtgtgtgtgtatgtttatacacacacataaaaacacacttataaatgtgtatttatgggccaggcacagtggctcatgcctataatcccagcaccttgggaggccgaggtgagcggatcacttgaggtcaggagttcaagaccagcctggccaacatggcaaaaccccatcatctctactaaaaaaaaaaaaaaaaaaaaatacaaacattaggcatggtggtacatgcctgtaatcccagctacttgggagactgaggcaggagaatcacttgagcccaggagggggaggttgcagtgagccaagatcacgtcactgcaccccagcctgggcgacagagcaaaactccatctcaaaaataaataaataaataaataaagcaaatgtgtatttatatctgcaaatatatatttatatttatataaccatatacatatactttaaatatgtgtatatataagtataaacagatgtatatacaaatagaaaatatttgaattcatatttgactttgaagaaaagcaagcagattcagaaaatgttcagaatcagaattgaattcaagagagcaaaatacctgccccccgcatctcctgctgagcctcatttctgcacctgcttcctaaacccctgctgctctctgttgctttgccagggctgctccttggtgcacttgctgggtgctcagtggtgacttggtcacaggcaggtggcaagagctgttggtacctccagcacagtctctatattctctctctgggcaaagggagaagctgggcactacccatgatatcactcagaggcagatgactgtgccatcctgtgccaggactcggggtcaccacacaggtaagggccaacacaggaacagagccagggagaacttttccacctctgccagagcttcttctcatccttccacatcccagaatccacacatggttcgagagatgtaggaggagtcaactgtggccacacttattgggcattgaaatcctgtttgtcattccttccttttccatctattcattgtcccttccattcattcagagagcatttagtgaggtcctactctgtactgggctctaggccaagtgctgaggcacagaagtgacagaacagacacggtccctgcctcatggttctgacatcctggtaggggccacaacacagaagaaagcccataaatagaataatttcagctaacaaatactacaaattaaataagcagaatgatagaggggagcttttaaagggtgggaaagaacactggttatataagatgatcagggaagtcctctctctctggaggtgacatttaagctgagacttgaaggatagaagagagaatgatggcaacctggactaggacagtggcagaggaatttgaaaaaatggataaaatgctctttttgttgttagcaagtaataagggacttgaagatgttaacatggctaatgtaatttaccccattgtacagttgagtttacagttcagtcattatttgtgtgtgtgtttttagccagaaactggacaaaaataagtaaatgtctaataatttatagaaaaagaaaagaagtatatatatggtagagaagtaatgaggagcaaggagggattaactctgctgaagatcagggaaggtttacagagaaggcagtatctaaataaggttttaaaggatgcataggagttttctatgtggataagggaaggaaagactttgcaggtagagtagacagaaagaagtgcgacactagggcatctattagcacttataagcctctatatgaattacaacaagtcattccctctgggaagacaatatcacttccttcattctcaacttcagccattacttgccccctcatcagacatctttgcaccatgcacaaattgtacaatgtacatggcatggtagacctaagtgaaactacaaggggtccgctgtgcccctgcctatcaggctttgaaatcctgtttgttcattcagcccaccaaccagccattcattcattcagaggatatttagtaaagttcctggggtttttttttttggtgtgactgcagttataaagagggaaagaccatttgtaatttagtcatggaaaaccgtgaagatccaccaggcagtgatacccaagcagccagtaggagagcatcaggctgggagttcgaaaccctgtgtcctgggccctggcttgtgccaccttcctcttcaaagatcctctagaggacaggcgtggtggctcatgcctgttatcccagcactttgggaggctgaggtgggcagatcacctgaggtcaggagtttgagaccagcctggccaacatggtgaaaccccatttttactaaaaacacaaaaattagccaggcgtggtggcgggtgcctgtaatcccagctattcaggaggctgagacaggagaatcacttgaatccaggaggtggaggttacactgagcctagattgcactatcatactccagcctgggcaacagagtgagaccccgtctcaaaaaaaaaaaaaaaaaaaaaaagatcctctagattatgctttgtaaaaatggagagttgaatcccaaaacccatcttgtgccctgcccccaccaggcaggtccagcatgactattctcaggactagttgtattttaataggggatcatgggatcatggagataaaatggctttaaaatcaaatgactgaaacactgaccacgtcttccatcctcaaggtggacctttttggagaggctggcaatggtggtgttggtcctttctctgtattctgagcactctctttacactgagattgttggaagaggtattcactctccccgacagctgtttacacccctagtaagtatgagccaggtgactttggcaggattccaaacctcagttttctcatctgtacaatgggggtgatgataattatatccacccagtgggaagctttgaaagccaatcggtagaagtgatacgtaaaagtgtttgagcaaggctggcatggagaggacatttgaaaaaggtggaggaggtggaggtgtggctgtcactagggaagataggagctgggcctgaggggaaaaaacagtgaagagaaaatgtaacaatgtgaaagtgagtgctagaaaagtctaatgagagaagagaataataaagaggagaaaagaagtgtttttaccacacagatgctacccattttactggtgagaaagctcgagccacagggaaataacatgctcaacatgaagctcctcttttttcaaacactatattttcctgtatgtcttattggctggaaaataaaataacagtaacagagaagcttggcttctttaagagagtatcggccaggctcgatggctcatgcctgtaatcccagcattttgggagaccaaagtgggaggatcatctgaggtcaggagtttgagaccagcctggccaacatggtgaaaacctgtctctactaaaaatacaaaaaaattagccaagcgtggtggtggatgcctgtaatctcagctactagggaggctgaggtgggagaatcacttgaacctgggaggtgaaggttgcagggcctggttctctgcgtcttcctcagttctctgcctcatctgacccactgaatagctctcatgtttacatagtgtactatgtgccatttcattcctaacttctcccctctcgaatcagtgataatccattgtttttatcatcactatatctatgggttttgttgacgagacctgattaaccctaaaaagtcattacactgcacaagtaaagcagtgttggggtggactgttatctagatgtgtattttccttaaaaaaaaaaaaaatgaggccaggacttcccctaccaaaccaagtcagggagcagagttgagaattaaatccacagtgtactgtgggccagtgttcttgagccagtcctctgagaactgttattctggagccgagcagcatttaggggaggccagggaattcaaagtggctgcagactctcttgttctaaccagctccagggtagaaattaggacagcaccgtacagtgaaaggagcaaggatttcatagcctacttactatctaggggcctctcagccttaatttccttatctgtggaagaggggcactcatgtctacctcacatggatgtcatgagaccagatttaatgtatagtgcctggaacgggtggtattatagctgctatttctcccaagcatacctgtgtcccccaaacattccgtttacctctctcaatccatgttccacctttctccatcctatttatttcttgggcacatgatctgcatgtattacatcaacaggctcccttgctgtctagcttctgattgggtttggccaatgttaggcatggcaggaaatgaacgcccaccttacttccaaccccacagctctctctttccctttggttaacagtagcctctccctgtccttgcatcttcaggcctggagatgtgagctctccctggctttactggccctggatactagagcatccttggtggtttctgggcactttgtccagatatgttaaattgttcctttattaagctctccttagttacccacttggagggtgccattcattccctgctcagactcaaactgatacatcctaatattatgaggtttatattgaggagaatagtaaacatgttctctgttgaacatctcccccttcatgaccacatcccaaaagaaagcctctgagaacttgtgattctcttttctcgaacctcagttaactgaggttctcatggtagaattctcgttggtgagaacaacactgggaggagctgtttctctaggatcagaatagggaattgtatcggggaaaaatgaagtgttcgaaaggagtttgggtgccttctggtgcatggccttctgttctccccataaggaccctcacaggaggacaaacccaagggaagtcctgctcacaagccgtggttctccatactggttccggcttgtcagtgcattagaccaacatccggataggggcctcttaaagaaggtgagagagcataacatggtgatgttaaaaccttacagatggcgagctgtggtatcataattaggaatctgggccgggcgcaatggctcatgcctgtaatcccaacactttgggaggccgaggcgggtggatcacctgaggtcaggagttcaagaccagcctggccaacatggtgaaaccccgtctctactaaaaatacaaaaattagccaggcatggtggtatgcgcctgtagtcccagtcttgggaggctgaggcaggagaatcgcttgaacccaggaggcggaggttgcagtgagccgagatcgtaccactgcactccagcctgggcgacagagtgagactctgtctcaaaaaaaaaaaaacaaaaacaaaaggagtctagataattttacttccttacattgaaaacttccactccttcagaatttcccactttctactttgcattttatatggatacaagcatttcttaacttcccctctgtaatctaaatttgaagacaaaaactgtccaaataaaattttcataatattaaaaatgtgaatctcatacaaataaagaaaaagcacatgtcaactacttaactaaatgaatgaaagaaaaggaagatgctaatgacatctcagagcatttgagaaacagatgtttataaagttagtggggaaaatgatgatgaagtaagtgtgtaaacataaataagactgattaatgtcctgtagagccataaaacagttagcactgagttattgtttctactagacaaaaacatttctatatctacagaatgaaaatctataagttaacatgtaacttttagtctgggccctaatcaataggaaataataagccaagtgaagatacatgctcctacagaattaaatactttggggcaggcctgtgccccaatactaagtgataaacttgcagtcatccttttgcttcatttccaagttttggaaaagttgtcttaacaagccatgtgctattggcactgtctcaccctagcacagtacctgatacataataaatatcgatggagtgtttgttgaatgaatccatgaatagagctaacagcccagcttcctatagagaaaggttagctaagctaagtcaagagcccacaattgcatcagctgccagttttccaagcaggaatcacaccatttccctagagaataacagaacagcagtccaaacaggaacaatctgtacaggcaggtggcaaagggaacaggtgccggtggcaggagctttctcttcacctctggccatatgtggcctatgacagctctataattgttttacagtgtcggggggtcctgttaataaatgggcattactagtttctagtagcacacagagctgtacaggtgcatcatgaaagcacaaaggagaactgttaagtctcagcttcgagtctttgaaaaactggcaatgaagctattaccaaaaaagcacctgtcagtgaagaaagtcgttggcagggctttggaattttccaacaggttttacccagctttgagctaacaggtagaaggatagagagaaaggagaagatgttctagtcattgcagatagaatctacatttcatgcatttgtgaaccactggatttttatttaatctccccaccctcaatttgatgttttcagcatttggaataaagtggagttttttttttttttgaagttagtgtgaaataatttctccagaacaagtgtctctttaggattccattccgaggaagtcagagctgaatagagtgagaggctttctgcaactctcattctacctcaccatggtcatttcacagaataaataaccaaggtcctatatcagtcagcttttgttgtgtaacaaaccacactgggttcactagcttaaacccgcaaggatttattatttctcatgactctctgggtcagcagggtggctctcatagcctggggaggctcagccagggctggatggtctaggacagtctccatctgagtgactggccattggcaggctggtgaatctggtataaattatctctgctgcacacgtctctcaccattcaacaggctagcttggccttcttcaccgagtgttctcagcattccaaagagcaaaaaaaaataggcaatcctaaggcacaagtgcttttcaagtctctgttaactgttgtccctttggccgcagtaagaagctcaaagaaggccaggcacagtggctcatgcccgtaatcccagcactttgagaggctgagttgggtggatcacctgaggtcaggaattcaagaccagcctggccaacatagtaaaaccccgtctctactaaaaatataaaaaattagccaggtgtggtggtggtgggcacctgtaatcccagctactctggaggctgaggcaggagaatcgcctgaacccagaaggcagaggttgcagtgagccgagatcgcgccattgcccttcagcctgggcaacaagagggaagagtgaaactctgtctcaaaaaaaaaaaaaagaaaaaagaagctcaaagagtgtggaagcaactacctgaggcgtggatctttagagaaaagaagaatttgtggacatttttgccaaccagtctaccataagtgcagaggtgcaataacttaccaaagctcacaaaacaggaagaggcaatgctgggacccagacccagaccttgaaactcctggccccagtcctttccacagtaccctgaacccttttcaggattccaaggttaacgtccaatgacctttgaaacccattttagaagtacttggagcagagagattagcaataggtttcaatgagggttcttaactttagtgttgagaagaatccatctccttaattaggataataacttggcaagggtccctaggccacccctaccccagacctcagcttctgaactctgccatccatgtcctttggcttaatttccaggttctccctctcaccaacagaacaccagccttggcctgggccttatatcccctcattctatgcagggagacacagaatcactgcaggagatgttcgccttctggtgtcctgttcgacacccgttccctctggtcgtaggaggacttagatacttgggccttttaggtgcactaatgatctggtgcctcttcaaattgggtcctggaaaccgagtcctagacagttaccactctgttttctttgccggtaatggagaaagcacaacttggaaaatcaccaataatccacactcattaaatatttgctcaaagtttgacttaaaggggtggctgaactctaacagggctgaagaggagggatggaagccccctggtggccactggtggcctggcctttatagccctgagctggttagctgcagcctggaaggctgatagaaagccttgcccttaactggatgctgaggatggctggcctcacaccacaagggctttatcaaagtggttctggaaagtatgatttctccatctctctacatttgcagggatgttttaggtgatgtgtgaagggtttgtttttctttttctttttttttttggcctaactcactttccactcgtgtactctgcttcttacatgttttcttacacttgaaagaataatttatccttcatttcagttcattctttagcctaacaggacataaaagaaatcggtcctggaaaagctaccactctgttttctttgccagcaatggagaaagcacaacttgaaaaaattcaccaataatctgcacattttcaagatcaaagcagtttacagaagtattcaagacacaccagtgaagtgttgatctccattttgtcagccggccccaagaaccttcaatgaggagagatacacagggatgggtggcccctccacctcaaagccagctccctacccaaatgcaaagagttgcccattcttcatttcttctaaagcctgagataataaacgaggtcactgccaagccctaaagtaaacatcgttatgatacattctgccgccataactagggattcctcagctattagtcagaccgtgacagcaggctccattcccaaaccaggactgagaccctcctgaattcttgagcccatgatgtacctgtgtcactggctctcagggctgtcgtcagagtgcccagcaaagactgaagcatacgtatggccgtttcccctctgccagcaatagttcctaaaggggcattgcactgtcatgcttgctataaaatacggccattgacatttgctctgttcctgctgcctgaaggggaatgattgccatcatacacaggcttcatgagagcagcagctggtcagccttgtcatctgtgtcttcacagtgcagtttttccccagtgcatcctggctgcctctttccaacacttctcagaataagtcccaacaagccccccaccaccccctgcttccactcctaggatcgtggtctccatccatcttcctgagcactaagaacaagtgtgccccttctagaaagccgattttatggtctaaaactcactttattcattctcctggttttctcatcttaggagtgcttgctcctcaatcatgttaaagataatcagtgtgccattttcttcttttatctcttcaaatggcaaaacttttgctcttccctttgaaataccactagtggcattcttgaacttatttttagatgtgtggaactgttccagacaaaatcgatgctcggcacagataaagccccgagtgtgtttattgtgggtagaagaaaatggagtgtttgaatgtggaaggcgcacagccatgtgcctgggtgcagtatggcttcctttcatctggaaaaaggaaacaagcattgtcgataataatatgcagatgtccagccccaaatgaggatatattgctaattaactatattgttagtttgttttaaggagagaggctgtagtgacattaattataatctctgttgtttgttgttcaaagtctatgagaccaaatgcattgctaataatatcttctttaatatcttcagtagaagattcctagggtttttttgtttttctttagaatcccacataaaagccacattaggggtaatgaggcctgtagcctgagcctaattaaaataaaatctaactaggccctcgttacccaatgataactttagccatcattatcatcaactagtacttatttgttgccccctgagcttgtgaaactgggggaaggaggagggagtttggagactgaagacagggcctgttctttgcctttcagaaatttgccagccagtctgccttcaagaagtctgcctgattgtgttaatctggggaatagttaccagtttttgccttaaagagaaaaagtactaaactttcctagacagccacaatttgttactgatttgtgcctcttctggaggttctgaaagtggtgaaatcaaccctgttcttcagattccagtccttggttggtgtttgcagaatagggcaggtggctatttgcagactgggacaatgatgcttagcacattttttccaaaagaggatgcatcactcatttccatagctttatcttcctcctattgtagtgctcatcctaatttgccctgtggcttggttgtccaaaaaacctcactccctctcttttgtattcatctgcctgtgtcaaatgaccagctgggggactctggccattctgaccactctgaccctagatgtggctatggccatccaccttggtcacaaacacagccacgatgagcaacgccagctatgcagtggctggaggcagtgattggacattcttggtgttggaccaggatgtactcagtataaaggacacaagtgattaaaacgtgtggatttgtcatctgagaaaaactgcacccagcctaaagatgagaggttttctcttcttgattcatctcagcagagctttcccaagggcatccagggccagctgatgagaatgaggaaggagggatgagatcccagcaccatgtagcttcagcaaacctccaagtgccccagaggatgctaccagagaagtggtagcctagtggacaagtcacagcgcagtgtgatagaaggctgtcagaccaaaggctggtgggctaagactgtgcgttgggcccgatgtgtataatatttaactctgttatttcatatgaaaacagcaggtgtctctgatcgttactctcaccacatttcagctctgaaaccctttggatctataaaccacagctctgtcagacctgagagactccttcaccaagattgcaaagctcctgaacccctccccagctccctgttctcttaacctgatgcatctgctgtacgtttacaagccttttttatttcagttcaaacattgcttcctctgaaaacctttctttctttttaataccaatttgcaaaggaaggagttttataatacctacctcaaatggtaacagtaggttttctggatttctctccttcatgagtatccttatggattttgatagattcagtgtacatcagtcaagtacaatctttttgtccaaattctctgatctgtgagcaatgggggcctgtcaagctgactcctgtgttctttcaagagtaccctgttaatcatcgaaagcttccttgcttcttgttgcaggaaagtatcccaaattcatctgtgccttccccgcccaagctctgcactcaatccatttgtccaaggaatgctggttccttttggtgaggaaaaacctcttgcaattgtgatagtatttggttggtgcaaaagtaatggcggtttttgccattactttcaatggcaaaacctttataattttctgggtcatcacaactcagaaattaaaatcccaagagggcacattgctactggtactgcagcattgtcaatgttaacattaagattaatgataacagtaaaagacatatggaggtcaccattccaggaccagcgtgatagctccataatactatcagggacctaagcccaccatctgtccagtcagccacgcttagactacagcctccatcctcaggcctgccagccgcctcatttcacgtcaagccttgtttcctcatttcaggcaggacaaagtggaagagagaaaggcaaatggcaaaaccgaatctgaaaactcctttgcagcagttctgtccagaaccttccacttactcctcatggggcagaattgtgtcatatggtcgcactcagatgaagtggatgctgggaaatgtagtttttgccaggtccacagccacctgaaacaaacaccaagtaagaaaaagaggggactagacattgggcaggcaattgcaatgtctgccacagtactgccatgtaaggcaaaatgctaggctgtaagaagaggatatttttattactattcctgtttttgataagttctaaaataatagaaggagaggagcaccaagcagtagctaaataatttgaccaatgaagatcacctgcctcagcaatggaagagttcatgtgcataagccgtttaatagctgcatttcttctgttttccttctcagtggtagtcacagctctgaaattatagtcacaagaggaaacattgctgctggtgctgcagcattgtcaatgttaactcatagatagttaactcaatgttaactcattgtcgatgttaactcatagattgatgttcaactcaaagacacattgtgggtaaagcaatattttcccaaactgagcaggcccccttgtgtcactttaactggggcagaatgaattcaatggcattttggaaagaatggtcatgatgctttccttaaattcccagactttcctaaggtatcattttcagagaagaatgtttgcttgcctgaataaaacacaaaatattttacttttaaccttgagatccacccctcttgaaaatctttactctgctggaataattcacgtggaatactcagtgagtgaacttggtaatagctggactgatgtcctcaaccaggacctccaaggggggctctgcaaggaggatgtgcagtaagtccctttgagaagagataaagaaaggttttcttctgcattactaggatattctgtctgttgtctcctaccctagatttaaagtctagatgactaaaataatggctactctcaaatcttgttattgattgaataaaacagggtttcattctatatgagccatccttagccacacttcccctatcctaggatttccaatttcttaacagcttgggggcatgccattgcaaggaggcaaggtgtccagttaaatatgttttgaaagaggtgcaagagtaactcagatgttcagagattgtgattagcatttctttattacttcccatcttccaaatactttacaaacaccaagcctgtgtctggggggcagggcggttcggagagatggagaaatgccacagttgtgtgcataactgaagccaaaacatacttcagccccagttgtctgactattcccggcagaggtacttgtggcctgaactgcccagccagtgaccctaacgcgacacttccctttccatgtgtagacacaacccaacccaagtatcttgactaatcctgcggggagggtacagggctcttcttattatctaatctgctttacatgcaaagtcctcgagtcctagagagtttaaggggtttgcttggtctggggctaagccagaagcactctgtggtggtgaatttcctaccaggaaaaattcaagagtcacatcaatcaatcaatcagacttagtccctgttttttcagacatctaggcaaaatgttaaagagtagcaaaaacacattttctacttcttctaaaatgtaagtgttcatagtaggaagagtactccattcacaggggaaaggaaagagagcctcatttttaacctaattaaacagtatacctccattgtggctatgaagttagggcttgatttacaagaagtactaaagcaattgggaagcaaattctgggccccttccaagatttgtaatcctaaatcctgcacaagaaattctccatgacaatctaactgtcctccctaatgttgttggagaagttttagggttggagattaagggaaaaaagcaagggaacaaatgcattcagctatctcccctttgggatgtcatcgagaaatcttatgttgagaaaagatagcatgctctctctcctctcctgtcttctcttctcttctcttctcttctcttctcttctcttcccttcccttctctcctctcctctcctcttctcttcacttcgcttctcttctctcttgctccttctctttctctcttctattctttctcttctcttcactcctcttctcttctctctcgctccttctctttctttcttctcttccttctcttctcttttctcttctcttctctttctccttctccttcttcttcctctctctctctctctctctctctctctctctctctctctctctctctctctctctccatgctaggttcaaacaataatacatttggcctctgttgcattgagtaatgtctcaaaatgtcagggcaactccctctaccaggatgtgccaggagacgaaaaccatggcagagaggtggctggaaaggtgaacaaagacactgcccccggccacatcttctgagctgtggaaaggcgagcaaaaacatgctgcagagcagccagctttccccggtcactgcatgttttaaagaggtgacagacgaggtctctatctccaccctccccttggcttcttcgaacattcagaggcggtctctgaaccagtgagtttgttcctgagccccattcctatttaaacagatttataaaaatccattcgcagctgggcttggtggaacgtgcctgtaatctcagctacttgggaggctgaggtgggaggattacttgagcccaggagtctgaggttgtagtgagctcagttgtgccactgcactccagcctgggcaacagagcaagaccctgtctctaaaaaatgacacataaataaaagtaaaaataataatcccttccctaaggttagctctccaagaagatatgtatctgctagtgtgtttcagcctcagtgctcttgaccttgggcgctcagagtcatgagtgtttttataccagatgtaaccctttggctgggtcagaggcactgtggtggggggcaaagagggcgtgtggagacagtgtgctgaaatatacactcccaaaccccaaaacatgcccaagaaaaacaagaacattaaccactgacccaaagcctggtgaaattctatctccttgtctctctccaccagtaaacatgaaaatgctatccctgaaggctggagtaaatcttctgtgagaggagagagggagaaaaagaaaggctggtttggaaaaggagtccagcaacttctcaatcactagagaaatttccccatagtgataaagaaatggtgacatttttcacagctgggaaaaacagtgggcttgcacttttcagtataaaaccattagatttcagaatgccttttcgtgactttttctttggctattcctgtctcttcatcctcatcacctatggttcttccctccttctctctacaacagcttcgctggccattctgtttctcaaaccagccaagctcattcccatcctggacttgagtgcttcctttgctgttccttttgctaaaatgtccttcccccagattatggcagggtgccaccttctcttgttaagatcttgcctcaagtgtcaccttctctgaggggttctccctgaccacctatctaaggttttccccagccactctccatcatcttctttcttttcttcttggcagtcaccgttctttgatctgatcttatttatttatctatggatttattgtttatttccctcaccttgttgtacatttcaaaataataggtctcatgtctatcctgtttattgctgtatctcctgtgcctagaatggttggcatttgatgattggatggatgggtgtgtgggtggaaggatggatggatggatggatggatggatggatagatggatatgtgaatggagtatggatgggttgatagacaaatggacagacaaatggatgaatgtatgtaatgaataatatggcccaagaactatatccagcttggtcagatcttttgctccatagcctacacaaaagaaaccaactctggacactagagctataactaaagccaaggtggttaatcagttgaagctgtgagaagagaaacataatttggttccagctctaaatgaacacctgttcttcctcaaaatagtgttttcatttttaaagtactttgaagcttaataaatagcccataactcattaacactcagaaaattcccaagtagcaggctagaagttttctgatgatctggcttttaagacatgaagaaactaaaccatgggtttgcaaaacaagtttggaatgccctactggcttaatttcagccactggaattgtccttgctcctgaatataatggactgttaagggtgacattttttaatcatgtgtctccttaacaggtgtttgcttgtttgtttgttttagaataacctcaacgtgggaagtgacaccacatcagaaaccagcttttctctctccaaagaagcaccaagggagcatctggaccaccaggctgcacaccaacccttccccagaccgcgattccgacaagagacggggcacccttcattgcaaagagatttccccagatcctttctccttgatctaccaaactttccagatctttccaaagctgatatcaatgggcagaatccaaatatccaggtaattcttggcacctggaagatgggagataacaaaacagtccatcttttgttttctgatgattccagtggaaactgctgccttacctcacttttcttcttaaccccttaatgattcctgcttaagatcatgttatctccataagaacagtgctgcatttcattaagtgacacccttgattgtgagatgcacaattattttgtgaaccactcaaaagaagaaaacactaccaattaaagtatgacacaccaaggattacaagatacatactaatttaagagacagtgaaatataaaagcaaaacaaaacaaaatagtctgaaatataaaaacaaaacaaaacaaaattgatgaaatgtggccgttataggaaaaggccaatctgacctgtgaatagattgggcaaatgttttcaaatatgagttcaaagcactcaggaaagctgtttctcttagtgcccctctaaacttgccttggacaccagaaattccttcacaaagagacaagcttccgttactctaaagtatacatgacttacaaaacaataagaggaaggaagttgagaacaggagttcctaggagagagatgactatcttccactaagttgggatctgatgaagcagtgggaaatgggaggttagggaaagggtgactggggttaaaaataataactctcacctacactgaaatagctcagtatactttacaaagcaaatgttgatcggatttgaccctcccaacaccctcatgaaggagacaaagcccgtgtcatttttctaatactattggtaatgcaccagatactcaggaagttactgtttggtttacccaaagtcacatggcagtaaatagtagttatagggctcaaatccaggctctcagactcccaacccacattcagaggcaaactcctaattttgaatgttgtttgtacctttctctgtttcctcccaaagatggtccccatgatggttgagagaggctcatcccccgggcaacccagcccctatccaactctcgtcctcatatgcctgcttccatattttttttaaagatggcctcactcagtcacccaggttagaatacaatggcacgatcatagcttactgcatgcagcccctacctcccaggctcaagcgatcctcccacctcagcctcccgagtagctggaacttcaagtgtgtgcccccacatccagctcattttttaattttttgtagaaacagggttttgccatatcgctcaggctgggctcaaactcctgggctcaagcgatccccctgcctcagcctgccaaagtgctgggattacaagtatgagccaccacagccagcccatacttgtaagctttgcttccaattctttctatttgtataggtgcaccttttctgtactttttcctctctggaccaaatgccaatttgcttacatagcagaaagttcctgaacttggactcagaccaattgatccttcattaactgcctctctctccacagactaacaccctctgcatgatacggttttagatcaggtttcgttgacctgagttgttttgctcttaacaccagcatcatgggagcacgcaaatctcactgagaacacttggaataccaacccccgctgtatataaaatgctgcattaggttataggaaattgaaaaatgtaagacctgttccctccaataaattagatctgtgtgaagatcccagctaccacataaaacagtgctggagggatcatgaagacagaggaggaaaagcactgtgtcccaagggggtggatctcaataggtggaaagaagtcggacaggctctattgatggcacagagtgacaaatattttggaggtcactctttgacaacccatgcacagaaatcactacaagccccagttaaaatttctggtgagtcttgtattgttttaattgataaattggaaaaacaggcctttggctccaatggcccctctccagggactggccacgtggtgtgataaagagcaatggaaccctttggaataggtgcagattggcaaggaaggcactgacttcataccgttgctcaaccttgtttcctatcatggctcatccatgtgtttatagatgttctggttccagaatcaggcagttctcatcccaagggtgtttaggccatgcccaaaacaatctgaagcctgctgtggctagcgctttttcccagaggtgggaatgtcacttggggcataatgctgaggactgagctataatatcagtgtaattgatttaagaattactaacgcaaagtcataggaaaatgcctggatgcgggagaacggaaggctgccggggactgttccttcattggaaagttattggctgctttgtgcttgaacccaatttcagacagaacttcttgggatcccctttctgtcttctagataaatccatctgtctgaaaattcccattccctacctagacctcacttgggtcttttttattttattttattttattttattttattttattttgacaaggtctttctttgtcacctatgctacggtacagttgtgcaatcatggcttgttgaggccttgaactcctgggctcaagtgatcctcctacctcagcctcctgagtagctgggactacaggtgtgagccaccatgcctagctaatcttttttattttttgaagagaccaggcctcactgtgttgcccaggctggtctcaaactcctggcctcaagtaattttcctgcctcagcctctcaaaatgcggggattatagacatgagtcactgcaactgacctgtcttttaaaaatattacttaaatattagggaaaagctatagcgtaaaggctgaaaggcagttgggactcccagagctgggaaccccagttaccctttgtacagcaaagatcaccgtaactcccaagaataaaggtttaccatagctccagatgtgaatgttattggccaaatggattaaaaattaatgcggctccagcctagctactgtcaaagtcaacaaatcaaaaagagtaagccaacaatacatttttgcctactgcccagtcaagttattctatttctgctctatacaatccctatcggttaattttctgtgagcaatacagaggggtggagggtggccagcattttattgatctgatgacgttttggccctgaagaaaataaaattgtggtgcgtttctggccttctgtttgtggaagaccacaaaatgttagtattggtcactcagaaagatgttcaaagaaagaataaaacaactgctacccctgggagcccccgccttctgttggcgtgtaattgtgtgtgtgtgtgtgtgtatgtgtgcatgtgcatgcacacaaacacacccacacaccacacagcactagctgctgcagccccatgcaccactgcacttgtgtaaaccagttccctggtggtcctttaaaacatgaggtgctttctacaaggaggtgatggtttccgtgttggcagccctcaccccttcctcagagcactgttcttttgttgaaatccactggtttgacacagggccgattcagcccagcagacagccctgctggtccctgacggtccctgccggccccgtcaaagcattccctctccctgggtagcagagtgaagtcaggtgaggggcccttcagtaggtcagcttccgctgccagggctcctggcctcatctgccccttcccctggcaacctgcctttgcccccatctggttctccctagctggagcctgggagctgaatgggaacttgatacccgccttcccctccgcacctccccaccccttcaggctctggaagtgtttcccacgctccagggctaaggaaacagcctgcacctttccaaagtgacatcgctaagcccatgcaagagtccacgtcccgccccctctccactccccgccccccccgcgcccggcccccgggcctcttgactttcaggataggaaatccttctaaaagccccaacacctgcttctgcagagcattttaactcccagaagtcaggcagcctcggtcccaagtgaatcagacaattctattttaagactggcttcaagctgtggaagtgaggaggggaagaaaatgcgcaaaatagaacaaaaatggtctcagactactaaactgagtctccatatgaaatttaaaacaatataagaggttgggttttatcaaaaacaaaaatcattcaggaaagaaagtaaatcccccagaacaagttagactttggtatccttggctgggttttcagtctgcagctgatagtcagatatcagagacaaaaatctctgaaataaatgcactgttaggcttactacattggttcattactacactagctattcacaaccaaaatattctcttttctggatcaagttgagattagtattcatttcaacccatatatttatttcttttctcccattaagacggacttaaaaatagtcatgtaaaggcctttttttccttgcacagacatattaacatggccacaggcctcttgagcgccacaagatacaatcagatgagttggccagggttacagttgtacgtgcttctacttttgattttgcctcctcctttttctctaaaatacttttagaggaatggcaggtctggctggataagaatcaagaaatttctctgcccaagacatggacccatgcccctatagagacaagcctgttcggctcagattctcatggggtactgctgccaatatatggaggcagattggcttgtgtttgggatcaggcaccaccatttagtcagccagacttgacctccgtagccccatgcgggttactggatgtctttgtgcctcagtttccttgtctataaaattggaatgacaatactacatatgagcagctatgtagtataatactatatataagtgtgattatctgtgaggattcaatgagatcatccatatgaagtgcttagcacagggcccagtataggataagcttcctagaacggatagatgctcgttggtgatgatattggagatgaagatgacaaaggaaatgtacaaaaaattaattgggaatcagaagaactggttcagagaccaacactacatcttccttgctgtttacctcgggaccttgaattctccaagccagtttccgtccctgaaaattgagtctaagttgtgtagaagggacagtaatgcctagattggcgtgctgcaagtctcaaagcagtaactacagttagctggggttgccacccttgttcttagagcatcagcaggtgtgagaagagggaattagatatcttcctagtccattttgtgttctttccatggcagttatcgaggaagaaggggtagaataatctggatttaaaacccttgttggagacaggtccttcaatgctctgtgctcctgaggaaatccttttcctctctggaaaatacctgcccactcccaccagtttccacagctcacaaggcttagaggaccaacaagcaagaaggctttcctgagtttgaagagcatggcctctgtattctcagtggcgttggtttattatcacctagactgagaatggtgtgggtttccctatgggaagtgcatttccgagcaagaatcaagagtttgcttctagtcaatgtattaattttcaagagaaggaaagctgatcaaggtgcattggaacttttcctcgtttcctaagacagaattatcgaaatgggcacttcttttggactctctttcttggagctggggagattgtgccagaaattgaacttgaggcttttgaaagagttccctttcttttatcatcatgacttgagtgtgaaaaagtccagaagaaaaaaatatactaagacacttcaattatgtgtgttaaggatgagaaaggacggtaagatctagagactttgtcagtttggaaatctgtgctcactccacacctacagttcatcacattgatcattgttcaagacatctttatcaacggattctttgatgctaaaaagcatgtaaatagaatgagagcaataggaaacataaaacgagccctcgccattggagaagtcattgatcacactcattaagtctttttaattggatgcctatgaaacctcaggctcaagattagatttcttcttttgatatcagcatgaggttttcactttgttaactgtagggaagggtgcggtggatcctaagatttgttgttttgtgttttgtttttgttttagttcagttgaggcagtggctagcaattaaggggaaaaataaacctctaagtgttgagatttagtcatcgatatagcttttggagtaaatttgtattttgctactcattgcctggccaggcaacaagtctattttgtttggatctgagcagcagtttggagaaaaaaaaaatcatattgacggtaatagcttgaaacatgaaattgtttttattcccagcttggagaaattgcagggcacgttttgtttaagcaatccctttgactccagtctgaatacaaatggaataccaaaagtgttgggcacattccctcttatctcctacccagagactgatttcattaccataattgtgggcttgcctggctcttggcagcctctcccctccaagacccttaatagccttgcagacgattgttgcagctcagttccctcagatggggctgcagagaagaaaggttatgtctccaaaggctcagcatcgccctgtcactgcccagcttggctcggctctacccagctgtgtgctccttctccacttgtctttctgagcttctgtgtgggtccctgttaccattactctcccacgaccattcattccagcaaatagcaatgatacaagatgtatgatgtattccttttcttttcttcccccctacccttttttttttttttacttttgggattactgaaaagctccacaattatttacaaatatgcaaagggtgcctacaagactggagtaagggtggtggcatggggtaaagctagtagtgcccttctaggtgtcccgtgacagaggagaagggtgcacttggcctgctgcagcctgagtagactctggggttgaaagtcaccctcttgaccatgtgtccagactccacaaaaccacagcccgggcccattggctgggcaacatcatttgaagtgagcagaataattcaaacctccccattcgtaacacaaaaggaaggggttatttgtctcagggatgggcacgccctggtgcaatttggcagagcatctcagcaactctatcagatgtcaggttagggcaaaagtggaaatgcgtctgcccagtacatcttgggttgattacttggagtgcatgtttctgattcatttgcacataactcatccagggggtgttgcaagagctatgcgatggccaaaggaacccaatgcgtcttttattatgttttttaaacaagtctctctacgttgattgtctcttggaaccaagaagcttcattcttccagccccgtgacagacttcaaaatgagactttcataaatctgagaacaagttctagctttggctccaggactatctgctctgaccctaagggttagttgaggagtgtgaaggctaggatgagccatggggtgagtgaaaattgtagctgggaaagcctcgtcttgaggagcttgtacttatgtctctatacaccctgaagcaaccagcccccacctgcacctgtggtctttttgtttctttggtctcatgaggagacagtagctctgtcacttactttttgagagacagtgtggcaaagttagggacagcatgggctctagaaccagactccccatgtctgccacttactagccctgtgactttaggcaagttgttgatgtctctgtgcaccagttttccttggtggtaaaagttatctggcaatcatctcaaaacttaatagtttgagacaatgaccacgggattgctgtgggtcaggaatttgactgggactcagctgggagagcttgtctctgctccatgtgatgttggctagagtgacccaattgaggctggaagatccacgatggccctactcacatgactgaggcctcagagctagacgtgggctgagggaccttggttctcctccatgcagcctctctctttacatggtctctacacatgtagtggtctaggctaagcttccttacatagcggttagaacattccaagagaatgaaaatgaaagctgtaaggcctctgttaatacctgtcaccattccactcctacccattctgctggacagagtgaatcacatggctaatgcagatctccagggaggagaaatgggctccacctctctcaatgggagatgtggcacacaaaaacacagatgggaggtctttacaagagttaaataatacaggtggagcatttaggatagtgcctggtacagagtttgtgttcataaatgttatgttttattataatatgattattctggtatcacttcaggaacaaatatagtacatgtttacttcctgagtgaaaggcttctcaataccacatggaggagagacaaactctccaggctcagccctactcaaattcctaacccacagcaatccaacagtcattgtttccagctattaagtttttagtcatcagtaaatcagggactctagtgatgaattttcccctcccaacccaaagccatgttccatctagccgtggaattcttgtggaccatccctggaggttttccattgtgtatcgccatgcaatctcagctttccttcacaacggatgcatccatcatttccctctgccctctcagactttcttccaagggtcatgtagcttggaggctgttgactccacactgaccccagcctgttctgaattcttcaggtcaccatagaggtggtcgacggtcctgactctgaagcagataaagatcagcatccggagaataagcccagctggtcagtcccatcccccgactggcgggcctggtggcagaggtccctgtccttggccagggcaaacagcggggaccaggactacaagtacgacagtacctcagacgacagcaacttcctcaacccccccagggggtgggaccatacagccccaggccaccggacttttgaaaccaaagatcagccagaatatggtgagtttaccacctagtaatataaaattggtgggaagaataaacgaggatgatgccttggacatggagccaagcaaaaccctgcttagagcatgtggcttttggtcttctgtgaggcaaacctcacaaaggctgtcttccgcagaagcccaaaggaggcaccagcagccacatttttctggaaagactataattttaaatcaaatcataatcactataccaattatccgaagagataatttttttaggatctttggggttctttctgcctcccccgcccctcaaatttcagttttatttctaaaaatgaagaaattctccaattaacttccttgtattttttactgtaaaaattcatcctgaaaatcagtgtagtaaaagagatacgtacggctgcttcctttgaccaggcaactgtgttatgtttgatactggcagtggagtggtccttgggaacccacatgaacgtgtgtgtctcaggtcttcaaagtaaccccccccccccaatacatttcaaaactccaagttgagagatctggtttcctgtgttttgggagtaggataagtgaggtaacaccttccaaattcagtgagttaaaataataaaagttcatttctcacttgagttgggtaggagaactcagctccactcagtcattcagggatccagcctcctcccattttggagttccaccaactgttagggcctgagagttatcccctggatattctgtgtccagctggtgtccagggaaagaaagggagcctggagaaggaacacacactcgtaaggccctcagcctggaggtgacacacatcagatctactgaaattctgttgggaagacctggtcacatggccccaccttggtgcaagggaggctgggaaatgtattctctgtgtgtccaagaaaaagaggaacccaatttggcaagcatctggccagattttgtggggaatcaggcagtttgttataaggatatttaatgtcttacaaatgcacccatcgtcatgattttcttgtggcttcaccatcagtggactttggaatgagcagtatatgaaggggatgacttgtcttacaccatttgcatgctaaccttaatccccatttttcaacagatagaccaattgtatattagacagtcatttcttctcattaatagagaattctaagcaacttgcaaaagaacaagacaaaaatatttttttgccacatcatcagttgttcaaccaacatttattaagagcaaatgctgtgtccagcactatgctgggtacaaaaatgagcaaggcatagtctgtccccagaacagatctcaccaatctgtggaccaagggagaaaattaaccaacagagcaaaatagtgccatggtagagatgtacatcaaatgccaggggaactgaaagagaactctagaagggatgtctcttctagccagcaggctcatgaaaccttcacctttcccaaaggaagtcaagttatctgctttccaagaggaaagacgggataatagccaacatttaaatagtacttaccatgcactagtccctgttcatggcgtttcacatatactatttcattaaatcagctctctgaagcagatactgcactttacagatgggaaaactaaagcctggaaaacttaagcaatttaacctggagggctaagacctgagattcaccccaggcagtctgggtccagaatctgtcctcttgaccactatacaattctgcctttctggggaaaaaagtagcacaccacttaggacagtagaaggatctagaaatgagtgcttaggttggaagataggaatgggaggaaaagatcagcgccactgagtgagagaagcacagaggaccgcttgatgccagcctgagattgcacagcgtttgtggcttcacctgtttgcccagcccacacagaacgttgtttctatgagtagagctcagacacctggcatcagaatcattcagttgcatgtttaaaaatgccaattctgggctgcagccccttccttatgtaccagtagtcctcaaagtgtggcccccagaaccagcaccactagcatcacgtggaaatgcaaatgtttcaagcctgactccagacctactgagtcagaaactctggagtgggacccagaaatccgtttgaacaagccctccaggcactctgctgcattgcgcacctctgtttgagatgaatggttctccaccttgattgctcattatactcacctggggaatttttttttcaatcccgatgcctagacttctccccagaccagttgaattgggatctctgaatatgggtcccaggcatcgttgtcttttaaagctccgaggatgacttcattgttcagcccgggttgaaggccactgctctccatctcctgaatgagaaggtctagaagtgagacctggagtctgttgtttgcatctttgtttctttcctttttcaatcaaggtcaccagatgattctcttgcacactgaagtttgaagaccaccactagaaacaactttttcatctaaagcctttacagagtacagtttgctgaatttatgagcattaagaacaccccctctatttccatcttgaggctagaatttgccctggggcagttactgtggctacctcagccaccctcacccccagcctcctagacctagagtaccattgagctcctcacatcaggagctcgtagcatgcctgggccatggagaagctccatcctgtattatttcaaagtacctcctagtatcttccccatcattagactggacatcgggattgctactttataaataaagtcgtgttctgtgcagtacctctaaagcagtgcttctcagactttcatgtgcacatgaatagccccgggccttgttaaaatgcaccttcgatgcaataggtataagaaaagggcagaagcctgggcgaagctgagactgctagccctccgaccacactttgagtagcaaaactctacgcccattgtaggtgctcagtagcatttggcagaatgaatgaatgagtgatcattgcttcccaggatagcccacattctggaattcatcttttccggaattccatacagcatcagataaactgagaattccccttttctttctgtttttttatttatttaatttttttaagacatggagtcttgccctgttgcccaggctggagtgcagtggtgcgatcatagctcactgaagcctccaactcctgggctcaagcagtcctcccacctcagcctccaaaagtgctgggattttaatcccacagacccacttttattgcagtcaacaggaaacttcaagcaatttctaagtatttatccctatattgtgtgctgttgtggaggaaacagaaagagaacatttcacccaggaaggagaggttcatgcaatagcaaagcagtgcaagtcactgtatctcggggcgtgcagcctcgtctgagacaggctaaaattgccacaggagctagcctttgtggaggaggtagatctcagagttttgaaggtagaatttttagtaagaatttatatatttgtccgcaaggattatttctaaaaatcctaggtgaaatacatgtaggatacaatggcatctgtagaatgaattacaaaatacacaacagaagacagaccccacttgtgatgatgaaaacacagatgagatgatgctgtgagtcagctcaactgtggaaagtatgtgtttgagatgctgcattttaaatctcttctgtgtagatacttggggtatccagggcaaagggagagttccaaataaatatgttttggtctaacagtagtataccatttccagaattgtttagaatagcccacataatgaaattacataggtactgcttattgttacttgggttaggacccagttgaaattctctaactggtcataaccctattttaatagatttcacagtgattttttttcagtggttttcctttataatgtttaattatggccacgtaagagcgtatcttaaagccagagcaacgtgggccagaatcaaaactgctagaataccaagctatggaacaggatacggtgggagcagacagatcttagatctaattccagctcagccaagcttcacctgtgtgaccttaggcaagtaccttaacctctctgagcctcagtctccctgcccataaaaagaggatgtttccacctacctcacagggttgttgtaggagttaaatcagtagatcgacagggcagctggttaaagcaagccctcagtaatcggtagacactgtcatctaggattagtggtgcaggtttactagtggccaagtcaagacccaagtcacttcagttgccccaccactatgactggcccacaggacgctagtgccctgaaactaagaaaggactactttaaaactccagcggcatccttgaaacccagctctcagcccactgcactcgggatagttttatttcctccttgagttatttgatgtcacagccaggggctgtcaaagcaccatatagatgctcccaggaactgttttttcctgccgttgtcattatctttgtgattatagctgctcacattcattttctgctctgggcagtggcccctggtaggtgagcaactgagaacaggcttgttttattatagcagaaaggagcactgccctcaatgatttgtccctgtcagaaatgcccgttctgttctttgaagacattaaacaaatagaaatccccaagaggagggtctttgccgggacattgatgggggcccgtgtgctgtgaaagcttcaggggagtgagctcacatacatacttcttcctaggaggcagtttcacttcactgtcagcctcaatagaaataattagccacatggcgagttctatgcctaactttgggggacccatatgaaaaaaatgtttggaaataaaatggctttgtgagcatttaaaataaagatgtggagaaagccacttactgcaataataaatccttgatggcttcagagtctggcagctgtctagagagtatattttagggaggattttatggggtatttgtaatagttagcttttgctgcttagaaaaccacccccaggccaggcatggtgacgtatgtctgtaatcccagcactttgggaggccaaggcaggaggattgcctgaagccaggatttcaaggctagcctgggcaacatagtgaaacctcatctctataaaatttttttgaaaactttggccaggcatgttggcacatgcctgtagtcccagctactcaggaggctgaggcaagaggattgcttgagcccaggaattcagggctgcaatgagccatgatggtgccactgcactccagcctaggtgacagagtgaaacctcgaaacagcttaaaaaataaaaaagaaaggaaaaaaaaagccaaccgcaaaattaaaggaatgaaagagttctctccctcacaagtccgtgggttgtctggactcttctggtctggtctggactggcttggctggggctggatggtttaggctggcctcactcacaatgaggggtgcccagctgtgtagatgctgtattgagatggctggggcctctctccactggtccctccccctccaggaggctagcctaggcacttcacgcttgggggaagagttccctgcagcaagacggaatgcacgggcactttgtatacctcagctggcatcctatttgctattatcccattggccaaagcaagtcatgtggcccatcctggaatcagcccgagaggggagtagccaagggcgtggatttggaaagaggaattatgggcatgatttttcacataatcggacacaatattaacatttaataatttagatccaagaaactataacaagaaagtgcctcatgcagggattccaacacaagagagtttaatgctaaaatacatagtttaatgctaaaatctcaaagttcaggggtgatgtctctccaaatttgctctctacattgcgataatggagaggccaggctgcatgagatttctggatagtggaggtccctttgcttttgcaaagccaagaacaccatttggcatcattgggttatgtcttatgctggtacccaccccacaggtgatgcaaactctacctaggggatttaataagatttcttctgacttactcattccccctttttatgagtataaaaacattataatctttacttttgacctttttttagctgttattccctttaacaaaatctggcctcggtggtgtgtgcaggatgtgactgggtgagtgctcatgtgcgtatgacccgctgcacctggatgcttctctgacaagtgtgcaattgtgtgcttgttccaggcacctctctggtgcccttggggaggtgactgagagacaccagactgcaaagttctcggtgggagcagcgactgctcctacctgagtggtttctccatccagaagcaacttgtttctccagtcctactgtgtgatacccaataagagatggtagagaggaaagaagctaatgccagggaaggcagccgaatttcctgacacagagcattagtttcaagcatctgcttagctgagtggttggaaaaccatttcttaggagaaaaatcaaagttcagaaaaattctttttgggggattgggaggaaaatagatggggcctcggggggcagataagatgggagcaagctctccactcagagttagggaggaggacacaaccatgaaatccaccccccaccaccccgctcctccaattccacttagtggactgaggaggctccacagccctgtgtttgcctgaggcatgttcagagtgaatgccatgtaaacaacagcctggaaggctggcacgggcccacatttcaggtagaaacatgtgtggactacattcctgctgggcctatgtaataacaatcgccacgacctgttatgaacagagggtactccctcccggcaaggggcatgcctttagctccacgcttggcagcagcagagggcccaaggccataggaagatctgggtaaaccaggagaaactgtcacagagcagaggtactgcagaaagaatcacgctttagagagaaagggcgtggtaccagagccctgctttcctttctgttaacccagtgaccttgaaccaggcatcctaccactccaagactttacttttgataagaggaactcagtttgataggtgtattagtctattctcatactgctcatgaagacatacccgagactgggtaatttataaaggaaagagatttaatggactcacagttccacatggctggggaggcctcacaatcatggtggaaggcaaaggaagagcaaagggacatcttacatggtgtcaggccagggagagtttgtgcaggggaactcccatttataaaaccatcagatctcgtgagacttattcactgccacgaaaacaacatggggaaactgcccccatgattcagttatctccagctggccccactcttgacacataggaattattacaattcaaggtaagatgtgggtggggagacagagccaaaccatatcaatagggtaccaccctctcccacacctctcacctccaagcccccctatttcctggcctacttttcctttttgcacaccactcatcaatttctaacatgccatctaattcacttgttttttgtgtttattgatgattgtttctcttttctcactaaaatattagttcctccaaggcaaggatctttgaaagttgtacttaatagtgtatctcatgtaccaagaattgtgcctgacatacaaaaagggttcaataggtattcactggatggatgttgaataatgaccttgagggatcatctctagcttcaccattaatgtatcggtaatctattgctacacgtaacaaaatatcccaaagttggtggcttaaaacaacaaccgtttattatttctcatgatcctgtggctcaggagttcaggcagggccactgggtaggtactctgctcctgatggcaacagctgcattcagctgtccactgggaatggctagaaggcttgagaaggctttgctcacatgtctggtgtctgtagtccatgtggctcctctctgtccatgtgatgtcccataattcacaggtctagcatggacatctttcacagtaactggattccccaaagcaaaagtcagaagctgccaggccttaaggtcaaggccagcccagattctagagaaaatagattctcctctctctctctttctctctgtatgtcaatgagaggctataagcacagagagggaaggaactgagggtggttacctttggaaactgcctagcatattaccccatgctgtgcaaatgtatgcattctcagtaagtgttttctgggcaccttctagggatgtacagaccaccacagtgcccaaaacctccttgctgtcacaaagctgatccctaaatgagccctggagctgtaaaccttttagctccagctgaaaagtcctctccagcaatcccctcccacagcgagaaggatagaagtgaataattgacaggctgcttgatggggagattgggagactctttggccaaagttgatgaccatctccctggctgtcttccagattccacagatggcgagggtgactggagtctctggtctgtctgcagcgtcacctgcgggaacggcaaccagaaacggacccggtcttgtggctacgcgtgcactgcaacagaatcgaggacctgtgaccgtccaaactgcccaggtgcgtttacctgagtgtgtagctccaagttcaaggggaaagctttttaatttatcattaaaaacttagtgacattgtctttttaaaagatgcactacttttcttttctttttttttttgagacggagtctctccctgtcgcccaggctggagtgcagtggcacaatctcagctcactgcaatctccacctcctgggttcaagcaattctcctgcctcagcctcctgagtagctgggattacaggcacatgccaccatgcctggctaatttttgtagttttttaagtagagaaggggtttcaccatgttggccaggttggtctcaaattcctgaccttgtgatccgcccgcctcagcctcccaaggtgctgggattacaggcatgaggcaagatgtaactacttttctaataagacttctgaccagagtgagtcaggagataattgatgagctgaatggattttctgagtcttatgcacaattgcagtggccgtgacctaaaagacaatgtcgcattgtacttatttaatttagaggagggactctggttagattgggtttttgatgtgggatttgttgtcccttgaagagaaacagaaggcagacactcatggtctgatgaggaagccaggatgagaggcttgacaaccatctgcaggaaaaagacagccccaccggtaataccagagagttgccaaaggctcccaggagcgcaacctggggcgtcttggtagttaactgtcactttatactgcattgtcagtgcttcaaaaactaaactaattgcacacttggtgagaggtcatgttgagagtcaacaataattgtgattgactatagcagtggttgtcaaactatggccaggtctggctcgagacctgtttttgtgtgtcccatacatttttaaactgttgtgaagagaagaagaaagagaaggaggaggaagaagagaaggggaagggcatggaggaagagaaggaggaggaggagggggaggaggaggaagaggaggaggaagctgcaaccaagaccatatgtgacccacaaaacctaaaatatgtaccctctgaccctttaaaaaaggcttagtaactcctggtgtatagtcttactgtgtatttcccattgccaggtagaataccagcctaaaataatatcttagagcctttcaagaaaccacacattccaaatggctttggctgaaaaaaatttcagagacagaaaatctgatccttacaccccagacttcctttttctaccttagacactcagttctccaaccagagacatttggaacaaaggagaaatgaaagcacaaaggcgtttctgaggagagggaggaagaatcagattggaatgaatgtgtatgttagcaaaaggggacacgtagaaaacagggctgaaatgcaagaagtggcggttctggctccatgtcagccatgcagatggatttcaaaacagtggagcaaccattacggtgcttttcctgactttcccatgctcattaggatgagctgagttggaagcctggtgggtggaatctggatgtgtagaaataagcaataaataataacaatatgaggaggaggaagagggaaacaggaaggaaatgaaaaagagaagaatatgaagtaaacgaaaataatgatgaaggtaaaaagatgaggcaaaagaaaatgaagattgcctggtgcggtggctcatgcctgtaatcccagcactttgggaggccgaggcgggcagatcacaaggtcaggagatcgagaccatcctggctaacacggtgaaatgccgtctctactaaaaatacaaaatattagtcgggcatggtggcgggcgcctgtagtcccagctactcgggaggctgaggcaggagaatggcaggaacccgggaggcggagcttgcagtgagccaagtgagccgagatcgggccactgcactccagcccgggcgacagagcaagactccgtctcaaaacaaaaaaagaaagaaagaaaatgaagataaaggtgaagaagaaaaaataaaatagatgatgatgaagaagattttttgagtacttaagtgtcaagcaaatggctaaagtccttacaggtattattttgtttaatgttcacaataactttatgaaataggtatttatgattgtactcattcgacagctatagtaactgaggcatagaggattaacttgcctagagtcacacagaaagcaagtgatcaacctggaatttgaatccggacagtctgattacagagttcatattcttaatcattaaactctttggtctttaccaagagaagggtattggaatcagccacacagggacacagatagcatttgaagtcaaggtttgggggctttcctgttgttttctcttccagagctcacatccagactcaaggtggtagatttaagtgccttgtcaggggaaggctcccctctgcctccatttacaaatgtttccttcttgttttctgtcaccgcggagagcagtgtggccaggagccctcttcataccttttcttctcgtgtgtcctcaccctccttgcatcctttctgcctctcagttcctggctattgcagcttttctgggctcccttgtaacatgaaggatttcgtttttaaggatctctttacttgtttgattcgttgattcccagctttcctggaaagactcatggggcaaagtctccctggcctggcagttattacactgtaaaagtttgtcctgtaggtcaaccctgcaaataagtttgaggtgcctcacataaaatcagagagagccccttaaaggaaatcaagtcagggaaaccagcagggaaggccaaggctcaccagcaaatgttaccacagtgcctcactccctcctcctcttattgctttagcttgcaccggattcctgattgtaaaggaagcttggttaggggtggtagtttgggtgagccagtaagtttgagtagagctgggttcagttcctcagagcaaattatgagaagcccaactttttctttctgaagcatcaccaacaatgctaagtgtcctagaatatgagataactcttcttggctatgcattgtagcatcctcagtgagctagacaaagaatgagctagacaaatattcaagggaaaactaccacctaacacttcccacttgctgctctaagtactttctttacaccaactcatttcattatttcaactctaggaggtagggcaatttgttcttcccatttacagatgtaaaaactgaggcacacaaaagttcactggctaccccaaggtcacgtggctagtaatgatttcaacgcacacagtcagtcattaagaacaagatattaaacactacgttctactgcctctggtttagtttgtcaccctgacaccatcctgacatgtgtcccccactgcccaaaaccccatccctgggctcagtgagtgagttcctaggacttattcaggcacatttggatctgatttcacgttgccaatgtatctggggttttaatatagtttctgcactacgacctgctttttactgtttcctctgttggcaagtttctgcccgtgagtagtaatgaatacaaaaaaggctttgttcaggtgtatttatttttttattgttggggtgggggagataactttttccatgtaatgatggaaaaatgagctcttgtctgtgtttaggaattgaagacacttttaggacagctgccaccgaagtgagtctgcttgcgggaagcgaggagtttaatgccaccaaactgtttgaagttggtaagatttttttcttttttaatccaaatattgacttagtgcctcggagattccttttgcttttgcaatgccatccttggatccacgtaaatgtttcattttccttttctggggtccagtgctcccagcatgtgtcttgcttgctgaatatacttcaagcaagagaaaacagtcctaagcctcctccaccggaccgagcgcttctgtgttcactctgctctctatgcagccttcacagccagaggcagatggggacctgtctctcagcacagaataagcccatagcaggggctcaagtcacatggaatctgttcttactcagccttcattgagcgtcctcaagaaaatcaagaaatggtgccctcagttctccagcagagggagggagggaaagaggagattttctcaaaatattgcacctccatcccctgcaaaaattttttatacaccgggccaggcgcggtgggtcatgcctataatcctagcactttgggaggctgaggcgggcagatcacgaggtcaggagatcaagaccatcctgactaacatggtgaaacccccccgtctctactaaaaatacaaaaaaattagctgggcatggtggcaggcgcctgtagtcccagctactcgggaggctgaggcaggagaatggtgtgaacccaggaggcggaggttgcagtgagctgagatcgcgccactgcactccagcactccagcctgggtgacagagcgagactccgtctcaaaaaaaaaaaaaaaaaagaattcttcataaacctttggtacagtttgctacttgtccactagaaaatggtagagcaaatgcaataaatgtaaaccaaacaaaatggaaagtgactcttcaggtgcaaggtgcaagcttacttttttgaaatagctttatgtgcttctctatatacttaaggattgtagaagggtaaaattccttctgtcccatatcttttagctacccaaaagttcttacttagcctcttcacctctgccctgcctcctcagtcaaaatttagcagtcctgagtctttttttttttcatagccctgcaatttgggagctaatttggtgaacaaaaatgttcctcaaatgcctattggggtcaggtaatggggtcaggtaagcatctcagtagaacaagtctcgaataaaaggaaagacaaataagaaagtctggaggaaaataatggtccagcactgtgatgaaaagaaaatggtctgggcacagtgactcacatctgtaatcccagcactttgggaggctgaggcgggtggatcacctgaggccaggagtttgagaccagcctggccaacatggggaaaccccatctctactgaaaatacaaaaattagctgggcttggtggcaggcgcctgtaatcccagctactctggaggctgaggcaggagaatcactggaacccaggaggtggaggttgcagtgagtcgagatcacaccattgcactccagcttgggcaacaagagtgaaactccatctcaaaaaaaaaagaaagaaaaagaaaaaaaagaaaagaaacagctacagtgtcgggggcagtagagaatggtagggtctgtgacaaaatgaaaagctttatccaaagggtcggccatgatgtggccgccatggaatgaatacccacccagtattgccagatgttctgggtttctaagagaggcctgaaatcttgattttgccagattatatcttaattttttaaatgcttgatagaaatttattttaaaaacaaatccaatcagaaatgtctatgagccaaattggatgcagtttggaaattcagtgtcgctagggcctctacctcatccctccaatcccttcacacacatatgatcaaattgcatttaacaggaaccgtctgcaaatacaatgcatttgactgaaaaatagaaatgactttaaaggcaagactttgacataaagtggtagaaccttaaaggcattcttctgagacagaaagtttctcaggactcttcatatcacaccccacaggcaggcagcatctagctgctttgcagaacacagcccagatgcacaaagccacattggcatgtggctaaggacaccagagctgagtagacatggtgtctcagtcagggtccaggcaggaaagaacatggcacactcaagttaggtaactgaggagcctttggtgagggactgcttgcaaaggtacaagcagagtggaaggattgaactttcattctctcaatgactactcagagaggaggccacagccacagcctatcccagctggcagcacctcgacactcttgggtgcaccctctaggttccctcccacttaatcctctttgcaactttatgagagaagtgctatttttatgcccaaattacagatgagaaaactgaagcacagcaaggtaaaatacctcactcaagtcacagagctcctgaaagttgcgttgcaattcaatcccaggctgtttagcatgcgatcccacactttgcctttcgccaggcctttctgagttcataagacatgcccaatttttctcttcctcgttctattgatgagtgcccaaagccctcttgccagctgcccctcaccctgaccgtgtgatttccacccacaccaccaccagcctcccaggctcctgggtcagagctggagtcactgctgatgtcttcctctctttactccaaagtccaccagccaccaaggcctggcagctgtaactctctgatctcttctgatcccacctgctgtttcctcccagagtatctcacctggaccctccccatcattatcggctctgaattcattttcttactgcacagctcagttaatagctcactatcactcacaaactttccatggctccctagtacccgctgaaccagcctaaactgaacaagattgccatgatctgacaccaacaatcttatattcctataccttctgctcccatgaaactgaacatgtcatgccccagccccagacatccccagcagattttttcctgcataaccttagtttgcacaatgaatgctacctggagagccttcccttgtccttcccccatcgatgctattgcagtctgtgtccattagacacctccaagacccagacaccaagatgggattaggcatgcaagagattttttgaggaaacacccaggaaagataaagaggaaggcagcaggactaggcagggacagctttcagatcgaggtgcatgcctgactcctacaaaagaagaaaggaaggcaggctcagccatgctgactgggaatcccagcaaaagttgcctgttggaggagtcgcttgtcgggcggttcccctaccacgctcagtcattggctgagagcagccagggggtggatgttaaaatcacgatagatccaaaggtgcaacctggaggctgctggtcagcaaagcatccacagcaggttcccttgtaggagctctgagcaggacacttgtggctgtcacacggccctgacatggctcaggagcaacctggtgtcacgtgctccttgaagcaaccctgacttcccctgctagaaatgaccttgcatttttggacacccctggggctttttgcctttgcctcccttaatgcaccccacattccaccacagttggcttccttagatatgcctcatcttacccaccgcagctcactggggcagatgacccacccactcactgggctgttggtgaccagcccacatttcctccacccatagcatgtccctgcacctccaactggcaacccctctgtgcctttgcctgaggtctttctctggacccgagcccagctgcgcatgaatgcacagggcattcctagctggaaatccaggaccagtcccctgtcagtgatgaatgggagctggtggataaaaactcagatccccatcaataaaaacaaatccggactcagtaaggagaggatttattcaaaggattattgcagggaggcaagggatgttatctccctattattgcaatgggatgaacgctgtgaccataagatctgcaagcatctcaaggttaggcaaggagagtttccttttatagagaagtaaataagggaaagtgagatgaaagagtggcatgatcagatagtagattggagaatgctctaccctgaagccagtctctttccaaaagggacccttaaggaggggctgtgctggtttaggctgagggtgggccaaagtccagggacctgggtgaaggagagaagcttaatcaaagtttggttaagatgcattttgtcagccaggcgtggtggcttacacctgtaatcccagcactttgggagtccgaggtgggtggatcttgaagtcaggagttcaagaccaacctggccaatgtggtgaaaccccgtctctactaaaaatacaaaaattagtcgggcagagtggcaggtgccagtattcccagctactcgggagactgaggcaggagaattgcttgaacccgggcagcagaggttgcagtgagctgagatcatgccactgcattctagcctgggtgacatagtgagactccatccactcactgcctcaccccccgccaaaaaaaaagatgtattttgtcctgatcaatcagtgaggacaagcagtttttgaggcaaagaagggaatttgtgcttctggccttgtcacaggtgaacaaagcagacctctgtgagtcttttctaagtcctatggggaaagggcgttctttgcaataagctgttttccagaatgcagaagggctgggggactcctaaccttcactgttttccaggatcacagggcttgggtaaagtttaacattgtctcagataggaaaatgctgaggcatgttctctatgcggtttcccagatcccagtgggagttaccagttccttacagtggttactcgtttgctccacaccctgtattagctgccctcccttctctaattcccctgctcccctgcctctgtttcctgaaatcacttcccaaaaaatcattttcactggaatctttttgtctcagggtctggggtaacccaaactaagacattcactaaacctgagactcactaaacctgaagtcctggactcagatgactgagggaccaagagatcacccataaatgaaaggatcaagtaggagctgtgctgagctggggaccttcggccctgtccatggaggggtcaccattcacctgttcacaggatcagttgttcccatgggagaatgcaggatcagcataattcgatcttttggtttttcaaataaagccaggaatccacatttataattggaataacctaattcttaaatataggcaactaatcaattatttttaatactgaaagaaccaaacacaacccttctgggggtagattttgacccaggcctacaggtcactggcctgtgacccaaatcttaagctccctaaaagtaagtgccccgggctccttcctctttgaggcgccttgccatgtgaatttgcagacagcgatggttacatgcctaaggttaagaggctgggggaaccagtccatatgtggcaaaatcaaaactgagtcctataaatcttcctttggggccttttccatcatatcatcacttatttctttatatttttattttttatttttattattgatttatttatttgtttattgagacagagtcttgctgtgttgctcaggctggagtgcagtggtgcaatctcagctcactgcaacctctgcctcccaggttcaagcgattctcctgcctcagcctcctgagtagctgggattacaggcgcatgccacaacacctggctaatattgtgtatttttagtagagacggggtttcaccttgttggccaggctggtcttaaactcctgacctcagtgttttaagatgatccgcccgcctcagcctcccaaagtgctgggattacaggcatatgccaccgtgcctggcctcatcacttatttagaggggagattcaaataattctgaattcttaagtttgttaggagtgataatcggatcacggttatctaggaaaatatcctcttttttgtagatgcttactaaaatttaggggtgacattatatatttccacaacattttttaaaagataaaacaaatataataatagttaaatccaggtgatgaaatatgggtagtcattgtataagaatattctctacttttctgtgtgtctgaaaatttcataatataaagtggggcatttggaggaagtcttgtgaataatgaagttcccaagttcaagggacgtgagaacggccatccacttctgatggtgccagggggctgcaggggtgtctggctctaggacaggagttgttgacttcagggagttgttgactttagtgtcctcctgcgggccctcaggagcagcctggtgtcacatgctccttgaagcacctcctgtgggccggttgtacacgcggtgagagggtttctctttggccttttccagacacagacagctgtgagcgctggatgagctgcaaaagcgagttcttaaagaagtacatgcacaaggtgatgaatgacctgcccagctgcccctgctcctaccccactgaggtggcctacagcacggccgacatcttcgaccgcatcaagcgcaaggacttccgctggaaggacgccagcgggcccaaggagaagctggagatctacaagcccactgcccggtactgcatccgctccatgctgtccctggagagcaccacgctggcggcacagcactgctgctacggcgacaacatgcagctcatcaccaggggcaagggggcgggcacgcccaacctcatcagcaccgagttctccgcggagctccactacaaggtggacgtcctgccctggattatctgcaagggtgactggagcaggtataacgaggcccggcctcccaacaacggacagaagtgcacagagagcccctcggacgaggactacatcaagcagttccaagaggccagggaatattaaagagactgggatgaggtggaggacgctgcctctggttctggagcacacacgtgctgcactgacgtgccgactggcgccgagaccttcatagctgcggtcgtgtatatttgtatataccacatgagtatttctcatacattacgctaggggcgtgtgccacgcccaggggactgccttgtgaagccgccctcgccatctgcagagctccttgaaagtgcccctggggagcgatgtgggcagaaggatggggacaacttggaagccagaagaagaacctggaagccacagtgggtgcgactcaattcacacccggatccagagtttcaaagagaggcaaagggggaaagagactgaggttgtaaacgttataagcagtttttatatataacttatttaatacaaatgtgacttaattaagcgtaaccttttctctggagttgtggtgaaactaatcacgtctgtgagagatcagaaagaaagagacttagggaagtggaagagaaagggaattttggaatttatttctttaaaaataatgcaatggaaatatatcaaaacatgtaaacgcccaccttaaaccaaatgttatttggtcatgaggcaccttgctggagtctcagattccaaaagtctcttcttcagactgggtagggaatatgatattttagggacaaagctgaggactggttttaaataggctttaaaataaaagatcaatattatcataatgctatcattctgctaaacggccccaaaacagtagaatttctgctcatgtcctagcaggttcagaagactgcagccaagttcagatgtaaaaacaagaagtagcacttttccaaaggaaaacaacaaaacaaatgggaaaaagataatggaccgcatttcacctattttaatactattttaacaattttttcatctaccaatatatccccaataaataaatataaaagggggggagggtcaatctggggaatcttagttttttatgttttaagaaaacaaaaaaaactgcattatttttgtaaagtatttattgagtcacggattattgtgcatcaagcaattgttaatatgacctggtcctatggggtagaacttaggaaaaataaagttggttcttattcaatattttactttgcaaaattctagtaaaagagagtatataataaaatcataataaaaggtgttacctgcatccttcatttatgatacaaatgccataaatagcccgtgtgaagcaagacttcaaggcaggggaaagaaaatttcaacccaggtgggaataaaaggctcattcattgattgacatgattgtgggtggtgtaagtcatggcatccttggcaccaaaatcgtctacccaacccccaggaggctgaggcccattgacacatgtgtgactttttgcccgcccagacctaaggaagccaaaccagagcaaaggcttaagacagcccagatgagcagggccacttccacagaaaattctgcaattacaattataagtagaactactcatcatgaaaagtattccttttcccgatgagaaaatcaaagctcagaaaacataaagacattggacccatctttcatttcctagcctagtattctctctactgtagcacatttttgaagtccttatattcccggtacctttggcattcctaaccccacccttaagttatcctgacacaattctattcttatggaaaactttttaccagtcatttacacattttttttttgagacagtctcactctgtcccccaagctggagtgcagtgacgtgatcttgactcaccacaacttccgcctcctgagttcaagcgattctcgtgcctcagcctcccgagtagctgggattacaggcatgtgccaccacgcctggctaactcttgtatttttaggagagataaggtttcaccatgttggccaggctggtcttgaactcctggcctcaagtgttctgcctgccttggcctcccaaagcactgggattacaagcatgaaacaccatgcccagacatttacaccttacaatgaattatttacaccttagaaggtattgcccattctcagaatatttatatttaagatctgtgtctaatcacggaatgagaagacttattcacatctgaagcaattttttgctacagatgaactgaactagtaggaagagaatcaatgcgtccgtgtatcaggcatatagatttggtttataataatgaggaaattttttttgcaaagagaattggctggcaatggaatgcattgcctttgaggtggtgagtatcctgtcaggacaggtattcaagcagaggctggagattagtcacatgaacagctcaactgggtgatcaggagagacaaaaatgtataggacaaaaccctctgatgtgtttgttaagtgtaagcacaaagtactatgaagaaatagaggcagaaatcagggaagtatctgttggttctaatgaaggagtgggattttataaagcataaaagagcaaggggaagtgggtgtatttgtaataagaaaatagtatggagaaaagcaaagaaataggtaagtacttggtgttttctgaaaaccgggagtttaaggtgatgagcagaggaacaagagtggcaagttatggagccatgtctaaggtatttttgttaaggatttagagtgaaatctcaaagagaacagagagctttcttactacggtgaaaatgactaatgtgagccatgctgtccatgagctatttgccttttaatatcagaccttgctgacctaatgaactgagagttggaaggtggggtaaattggaggggagggctccaggactctgcctactgagaacaccctggtctcccatgcatcatcagatggttccaaacctctggaaatttgctgaactataatccacctctattaggatgagctaattttcagtcccaatgctttagtgggccaatgagtgatcttcggaaatcaagacctcatgcctaggttgtctaataagactaggagacccttatctcattcaacacagggccccaagctggtgccagggcaaccccaggcagttcactcagtgggcagtagatcatctgctcaagggccagctttgcctgcagcagagtaaggaatgagcaaggccacttccacagaaaattctgtggaattctaaggaatgtctgcagtctcgttgcagtccttgtaaatatgaccccgcagtagctgctcaaatttttctctttgagtgcactgctcttttgccttcccctggaaagagagttctagtaattcagtgggcatcctgggtgccacatctgaacacaacagtggtaaacagagatgcccacggccctctagtggctgcacatgggaagggtaaaggagaggccagggcagcctatagctttctcttcggacccagttcatgtaaccgccatgattatagtctcccaagcacctcagtctttatgtcttagtggccaagagggtagagttctctgtcttaacgccggggattaaagaacagctactatacaagccaccatcttctgagcccacactttgtgtctctgtgttaatcattttaccacaggagaccggcattattacatccagtctatagataaggaaaagaagcccaacaaggttagctaacttgttcaaggtcagaccacttggtaaatgacagagctccttgaagccagcagtgtctgatcaccaaagcccaggctcttaaacctaacgcctgtgctctcctctcctcctaactcatcccaaggtctgctggatccatgcttttctgtgactcactgcctttgcttagattgttcaaagaggatctggctttatctctatgtattttgcccagttatctcatagtccataaaaggattttgtggttctatagctgagcccttgctcaggttgggtaagtcacaaagctcaacatttctaaaagatagcctgatccatgggtgaaaacaaagatgggtctgcttttcccaccacacataagccctgtgctaactgctgcctgttaggtagagctcaggggcaacataacaggcacctaaccttcctacatgcccaggttccagcactgcacctggcatgcatagtcaggcaatgtgcagagggcttaagagtttgagggttcagtgggcctggactccaatcctgactctctcacttgcctgctgggagttgtcagacaagttaatacattggcatttagtcatttgccaaatatttattgagcatatacatacgccagataccagggatacagcggtgtacaaatcaaagtccctcctcttggaggggagatagtggataagtaaataagtgcagaatctgagattatggtaagtgatataaagtcaagtttttgatcacacatgtatgatgttacattatttaaggtgatgctggttgctgtaacaaataatcctcaaaatcacagtggcttaacccaaaaaaactctaaagagtatgtttctagccaagtggcccacctctaagtgacaacccagggacccagactccttccatcttgtggctctgccaccatcaaggtatgactttctaggatgccctggggtcatctcaatcccagtctgttcaaaaggtagaaagcagggagaaaacttgtaaagttttttgtaggttcagcagtgaagtactgtccaatgcttccagtcactctcctcagctctgctacatgacacatccttctgcaagggagactgggaaatgaagtccagatgaggggtccaggaagcagagatggctgcatgagcacccagtcagtctctgccaactacccaatccacaagacaggaaagaaaggcagcagaagaggctctgggtggaatcaaagtgggcggtcatggggagaggtccttctcactcccccactgtcttccacattgtactatagtgctaagctggaccccattttccttgtctataaattggggtaagtccacctgtccaaactacccattgtccagtgcttttgctgtcccaagcatcccctcagcactttccatatctgttcaaaccagcccaactttcaagcagcagctcccacatgtctttgcctgatggctttttccatcatcgtggagcccagtgagcttgcacagaagactggaagtgctgggagtcaacagactgagtgcctgtcagtcaactgtttggtgatcttgggggaatcagtaaacccataagactccactcattggtcaatgaataccccaactccctcacccctcgagtggggccattgtgaagtgtgttttataccagtccacgagctcccagtgggattgagttccagttgcctatagcagtcacctacttgaaaacacacactttattagcttccttgccttccccatctctcttccccacttccctactagtactcgctggaatcttctaccaaataagcagcttgctcagcgccatctctcagagtgtgcttccaggggaccccaaaccaagacatcacttcacgcttaaatacttattaagtgctattcaaatattattgttaatatttgatatttaatatttgataataacatagtattatttgaatagcacttatttcattgtgcacatctgaagatggttttgctatgggtgataaatctaccaaagaagagtcaatctcattctggccagagacaggaactctactagattttaataccgttgagttgttaaaaaaaaaaaaaaaaaaaacccttaatttttattattagattcaacagacagaaaattaatctgccaaatgcctctaacatttttaagtacttttccataattttagaattaatttccttgctgactacagacccgtactactctgaggaccacacttggagtgggactgctcaaatcaagtgagcaatagtgatcaaaacccctgtgagtgtcaattccatcccgacacacaaagagttatgaataagcttcccaggaagtgttgtggggcggggattagggcggagttctctgtttgtcattcatttacaatttccaatggaaaaatgtgtgggtcgtcccattatgcctgcacaatttcggacaaattaaaggcttgcctcagtaattactgggtgggtatatacagaaacatacatccatgtctacaggtcctgcatacagtagtgtaaattaaggcagaaagtttacagccagttgtttttctgaggcttagtattggtttaccatatgagagtagaaggagagggacatattccaggatcagaaggtaagatttttaaggaacgaatttatgagactagcaattcttggttgaatcccaccaaaagaacaaagtttaaatgcataccttttttctttttaatttctgtgtagagatttaaaaaaccaagctaaaaagaccagtgccttgcctgtaatggcaaaaataacatcatcctcaaccattttagtggcaggggaatgagtggggcactggattgagacacagctgcaatagcaaagctgggtaagaattttatgactttgctaattttctatctgttctgggagtaataaatgtgcccttatagatattcacgattgccctcaaaatgaaaaaaaccttttaaatggcacagaaaagcctttcattcttgaggcatgtaattcatggatgattttcaaaatgtcatatttgaattgggaaagtaacatttcttgaattaatcagccaattgcttcaagaatatgactcaaaggatataaaaatttcaagcctgacttttaaaaaagaaaaaggaattttttttctatgttgtttagtttatttttcacaaaggtcatagctaaatcaggtttatttgccatggaagagaacagtctaaatgaagtacacttttagttctttagtaaaagggaatgttagcaaattttaacaagcaccactttaaatttttacaccattagacatgcggttttgctttgtctagttatacccttctttatttccctctctaccagattttggtggtgttttttgtttgtttgtttgtctgttttcacctttggagagctcagcaaatggagaaggagaaaggacaaaaaaaaaaaaaaaaaaaaaagcaaagaaaataaaacaaagacttccaggacaaaattctctaaggggcctctaaagtcactcactctctgtgttatcaacataagtaaagggaggtctttgcaaagggaagacaagagagactcataccactgacttgacttttcccaaagaaccttcaaaaatcctcccttagagctgtcaggacccagcagagaccaggaagggattcctaaaggtttgaagtctcagagccaagggatggggactctggtcaagaaagaacgaggtgtcccatgctggtggctacagaggacagaatctcctgtcaagaacatgtcaggatcctcacctggggatcctagagagtggagcccaaggccacctgctctgtgtttcaggaaaaagaccacatttgaatccctcttgagggctccctcctgctattacaggatattggagggagagagaaagaacaaaagcagctgatccagtgccagaaagataaaggcttgttcacactactcaccagcagcaaatgtataaagctgaagcttaacatcaaactcactttctgttccactcttcactatgtctacacagcaccattccagtcaacctccccacagcattcctcccatcccctcggccacacatttgaccctcttatagccaattggccatcctttgggccagtctttttcaaaatacttttggaacattttatggaagtagtacatacattcagaaaagcacacacgtatcataagttcacggctcaatgaattttcacaaagtgaatacacccatgtcaccaacatccataccaacaccaagaaaaaacagaatataaggctcatgaaggagctctctggggctacagaaatgttctatatattgtgtggtttgattgtcaaaactcactgaagtgtacactttttaaaaactgaatttctttgtatgtaaattttaccacaacacaaaataaataaggcaaaaccagcactcccatgcccccgtccagtaacgggcactcactcctcaccaagaataatcagtatcatgaattttacaccagattagttttgtctgattttgaccttcgggtaaatggaatcgtacagcacccgctctgtgaggtctggcatattttgctcaatattggattgtgaaattcttccatatcgctgcttgcagctaaaggtcattcatgcttatcacatttccaatgtgtgaatatatcacaattttatttaacagttctaccatggaggaacatttggattgtttctagattggggctttcacaaagagtgctactatggacagtccagggtgtgcttttgggtgtgcgtattcacacatttccatggggagtggaattagaaggtcatagggcatgcacagctttagttgatactgcccagtagttttccaaagtggttgtcctggtggacactccgtttaggagtgtttgaaagttcccattctttagccaatctcaatttcacccccttcactgtctttcctgactactccactctgtgatctcttaattatttatgtttaactcaatacgtgcatactgagccccattcactgtgctgcgtgctggggacacaaaaaggaatagacaggaatccatcatcaatgaatgaatggcccagtgggggtgtctgtaacacagtgtgaatctgatgtaactcagatgcttgtaatacaatgtaaatggtaccatgggaccaaatgagggtgtgattaattatggcagtaataactagtgagccagaatttatacattattatttaggaaaataaacccaatgattccaagtcttggcaaggcgatgaggaaacagaaactcttaccatcaccgcttatggtgttatgaattgaacagtactttgcctatatctagtaagttgaatctgccacatagctggatgcatcagtttcactcctgagggcctgtttttgtattgtcaaaaagtggaaacagtttaaattgtccaccaacagaggaacagacaaatcaaccatgttaagttcataatagagaatacaatccagctgttaaatgatctaggctattcgtattgtcaaaaatgtgtctatactgtctgaaaaagaaaattacagatggatgcatgttaggtacagaacatttgtgttcccccaaaatttaaatgttgaaatcctaacccccaaagttatgatattcggaggtgcagcttatgggaggttattaggtcatgagggtggaacccacatgaatgagattagcatccttacaaaagggaccccgagagagctctcttgccctctttccaccatgtaagcacaaaatgagaggtcagcagtctataaaccagaagaggactctcagcaaaatctggccatgctagcaccttgatctcagacttccagcctccagaaatgtgagaaatacatttctgttgtttataggccactcagtctatggtagtttgttgtatcagcctgaactgactaagacagtatatgaaagtagtatacaattttaataatttaaaactcacaatgcaaggctacattatatctggacaccaacatacataataaaaatactaaactatgcatgggaagactaagcaccaacttcaagacaatagttacctctgagatgaatgacagtgagtgggtggaggaggggatactttagaggtaacattttatttctttaaaaaaaaaaagcctaacagaataaaggacaaaacattttatgctcatctcaagagatgaagagagtatttgacaaaattgaatattatttcataataaaaactctcaatgaattaggtgtagaagaaatgcacctcaacacaatcaagaccatatagcacaagcccacagctaacatcatactcatcagtgaaaagttcattaaagcttttaaccatcagtgaaaagcttttcctccaagatcaggaacaagacaagcatgctcactcttactgcttatattcagcacagttctggaaatcttagccagaacaagtaggcaagaaaaagaaataaaaggcatctaaatcagaagacaggaagtgaatttatctctgtttgcagatggtattatcttatattcagaaaatcctaaaggctccaccaaaaagctgatagaattaataaacaaattcagtaaagtcataggatacaaaattaacataaaaaaatcagcaatgtttctataagcaaaaaaactatccaaaaaagaaatcaagaaaacattctcatttacaacagcatcaaaaaaaactaaggatgaatacatttaaccaaatggatgaaagatctgtacactgaaaagtataaaacatcaatgaaagaaactgaataaaaaataaacacttgaaaaaatactctgtgtttacggattggaagaatttatatcacaaaaatgtccatattacccaaagcaatctacaaattcgatgcaatccctaacaaaattctgatgatatttttcatagaaacataaaaaacaattccaaaattcatatggaagcacaaaaaatactaaatagccaaagcaatcttgagcaaaaggaacaaagctggaagtataacactatatgtcaaaatatactacaaaggtgtagtaatcaaaacaacatgatactaacatataaatcaatggagcagaatagagagctccaaagtaaatctacaaatttgtggtcaactgatctttgacacatttgcaagaacacacaatggggaaagggtggtctcttcaataaatggtgctgagaaaactggatatccacctgcagaagaatgaaattggactcttatctcaccccacatataatagtcaactcaaaatggattaaagacttaaatataagacctaaaactgtaaaacaactggaaggaaacaggaaaaaaaatgtattgacattggtcttggcagagatttgtctcctgcccaaatatgtaggcaacaaaagcaaaaataggcaaacgggtttgcatcaaaggaaaaaggttctgcacagctaaggaagcaatcaacagagtaaagagaaaaattatgggctgagagaaaatacttgcaaaccgtacatctgatatggggttaatccgaaatacataaaaaactcaaacaacttaacagcaagaaaacaacttgattaaaaagtgagcaaaggacctgaatagacatttctcaaaagaagacatacagaaggccaatggatatatgtaaagttgctcaatgtcactaaccgcaggaaaatgcaaattaaaactacaataggatattacttcatacctgtaaggaagatgtttatcaaaaaatataaagaggccaggcacggtggctcacgcctgtaatcccagcactttgggaggctgaggcgagtggatcacctgaggtcaggagtttgagaccaacctggccatcatggtgaaaccccatctctactgaaaatacaaaaattagctgggcatggtggcgggtgcctgtaatcccagctactctggaggctgaggtgggagaatcacttgaacccgggaagcggaggttgcagtgagctgagatcatgccattgcactccagcctgggcaacaagagtgaaactccatctcaaaaaaatagatatagatagatgatagatagatagatagatagatagatgatagatagatagatagatagatagatagatagatagataataaaatatttgtaagaatgtggaaaaggagaactcttgtacactgctggtgggaatgtaaattgctacagccattatgggaaacagcatgaaagctcctcaaaaaattaaatatagaactaccatgtaatctagcaatcccactcctgggtatatatccaaagaaaattaaatcagtatgtgaaagagatatctgcatcttcatgttcattgcatgattatactcaatagctgagatatgaaatcaacataagtgttcatatacagataaacaagtaagggaaatgtggtatgttcacattatgagatgctagtcagcttttaaaaaggaagaaattctttcatttatgagaacatggatgaacttggaggacattatgtttagtgatataagtcaggcacagaaagacaaattctgcgtgatctcacttatatgtggaatctaaaaaaatcaaactcataccagcagagagtagaatggtagtaaccaggggcttgggaggcgtaaaggggtgtggaaaggggaaatgttagttaaagtgtacaaagtttcagttaggagaaacaagttctggagatttattgtacagcatgatgactgtagttaataatctattacatacttgaaaattgctgagagtctattttaaatattctcaaaaaaaatgaatgtggtgattgatatgttaactagcttaattttcccacaatgtatacacatatcaaaacatcacattgtacaccataaatatagacaattaatcatttgtcagttaagaattaattaacttttttaaaagaacatatatatatcttaaagtgttgatacgagttaaatctgagtattgggtagggtacaactgctacgttatcttctgtatatgtgatatattttaaaccaagtaccaaaagtaagcaaaactaaaagggaaaatgcaattatgctgtgagtttagatgggatcctacaaagccatgcacatgtgagttcacagccggcatatgtgagttcacagtcggcatgtgtggccagtgtatgtggccgtgatgggttgaatatggaaatgtcgtgggtgagacatccttactcactcactcacaggtaatgaagccactcctaccagccttgctggttcctccaagagatgcagagaggcacatcctgcacaacgccctgcaacttctcccttcctctccctcatgcacagtctgagataaacagagcactagactcggaaccatgttctaaattcagcatttactggacaggaggcctcaaacaagtttcacagccctaatgagtcgcagcctgctgaatcacaccttccactctctcctgctctcctgcctctggggccatgacagtggactgaagggagccaaggagacataataagaaagcaaactatggggcccctggctcccacctccagctgaaacacctactttgtgctactctgggaaatcatcacacttagtcatctttacaatttttacaaatgaggaccctgaagctcagggagtgggcttgccatgatcacaagagtagatccgtatttaaacctgggtatgtctgactctaaatccatttcttcttttccccactttttattcaaatgtggaaatggtatctttgatttcttttgttccctctgcttcaccttacctacaccaaaggagcatctgggtggggtgtggaggaagtaaaatttgagcctcatctgcgcatcttccaaattctagcaggtccccctcgagctaaaaggcattttttcctgatcttcaccagtcagttcttctttgggccccatcccaccaccttaaccaatgactcccgcatccaggtctgcccacagatcccttctacagcctccccctgaaaactaattgcagattattagaactttggcttccattccagtgtggaagaagccagaatttaacactccatcctaacaatttccccccacacgcacctgttaagtttagcctaaggctgcctccttacacattttaagttcaacctaaaggtttctctgcaaatagtgaagtgtaacctaactggatgtgtaaacagactgtagcttactcttgtgtcaatcacagaattttggccaatcacaggcagccaactattcaaaccctgttcaaataaggtaaacacggagccgtagtcaattgggctgtttctgcacctcacttccattttctgtacaacactttcctttttcttccaccacacagcagggctggagtgttgctggagtgtctctgagcctattcgggctcgggagactgcctgattttgcaaatcattctttgctcaattaaactctgctaaatttaatttgtctacatttcttcttttaacacaccttaccacatcactaaagtcctattttaaacagctccttttaccaatatatcatgtccagctatcaagaaaaaattataagacatagtaaaaggcaaaaactacagtttaaagaaacagagcaagccatcagagccagactcagatatggcagggatgctggaattgttaggccaggaatttaaaacaacaaggattagggtgctaagggctctaatgaataaagttggcaacatgcaaaaataaactggcaatgtaagcagagagataaaaaattctaagaaagaaacataaaatgagatgctaaagatcaaaaacataacagaaatgaaggatgcttttgatgggctttttggcagactggacttgactgaagaaagaatctctgaacttgaagacatctcaatagaaaccaccaaaactgaaaagcaaagagaaaaaaagactgaaagaaacaaaacagaacagtcaagacttagagacaactatgaaaattgtaacatacacataatgggaatacaagaaggagaagaaagagcagaagaaatatttgaaataataataacagaatttccctcaaattaatggcaaacataaaactataaatccaggaagttcagagaataatgagtgggataatgccaaaaagaaaaacccctacacctaggcatatgatttttaaactacagaaaaacaaagaaaaaattccaaaagaagccaaagggaaaaaacaccttatctataaaggagcaaagataagaattacatccaccttctcctcagaaaccacataagcaataaaagagtggagtgaaacatttaaagtattgagagagagaaaaaaaaccacctagatcctgtgccctgtgaaattagacttcaaaagtaaaggagaaataaaccttttctcagacaaacaaaaatggatggaatttgttaccagtagaagtgccttgcaagaaatgctaaaagaaattctttaagaaaaaaggaaaatgataaaggtcagaaactcagatcttcataaaaaaggaggagaatcagaaaaggaatagtgaaggtaaaacaaagtctgttatttttctctttcttgattgatctaacagataacagtgtgttcaaaataataacagcaataatttattcaattatgcacatatctatatctatctatatgtttatacatgcatgtatgcttatgtataagtgaaatgaattccagcaataatacaagggatgagatggaagaattagaattattataaggttctcacactatccatgaagtggtacagtgttatttgaaagtggacttggattagttgtaaatgtacattgcaaaatctagagcaactgctaaaaaaaagtttaaaaggaagtataactaatatgctaataaaggagagaaaatagaatcacataaaatgctcagtgaaaaccacgaaaggcagaaaaagaatggaagacaaaaacagcaaaaaacaacaaggacaacaaataaaaaatagtaataaatatgataggtattgatgtaactatatcaacaatcactttgaacatcaatgacctaaatataccaattgaaaaacagaggttctcctagtggatcaggaaacaagactcaactatatgctgtctacaaggaatccactttaaatataaggccacgtagaaaggtaagtgtttgcagaaacatgttatgcttgcaccaatcaaaggaaagtagcagtagctatctcaaacagagtagacttaagaccaaggaaagttatcagggataaaacgagttgttacgtgatgataaaaggatcaagtctccaagaagacataacaatccttaatatgtattcacctaataacagaacatcaaaatacatgagaaagaaactaatagactgcaaaaagacatagatgaatccattatcatagttacagatttcaataccccaacatccctcatagttgaactcaacaacacaattaatcaactggacataatggacatctatagcctacttcatccaacaacagcagaatacactttcttctcaagcttatatgaaatattcaccaggacagaccacatactggaccataaaatacaccttaaaaaatataaaagaatagaaatcatacaatgtccactctcagaccacaatggaattgaactagaaaacaataacagaaagctgaaaaatcccaaaagcttacagattacacaacatacttctaaataacacatgggtcaaagaaaacatctcaagacaaacttttaaacactttgaactaaatgaaaatgaaaacacaacttaccaaaatttgtaggatgaggcaaaagtagtgcttaaagggaaactctgaaaaggtaaataaattcaataagcttctgcgctggccaactgtgaataaaagagaaagggtacaaattactaatatcagaaatgaaagagtggatatcactacagatatcatggacattaaaaggataataaaggaataccatgaataactctatgcccacaaattgataacctaaatgaaatggatcaattcctggaaaaacacaatctgccaaaattcacacaagaaggaacagacaatctgaaaaggtctatatctattaaggaaattgaattgataattaataacctgtcaaaacagaaagcactagcccaggtaggttcaatgttgaattataccaaacattttaaaaagaaattatttcaattctctacaatatctttcagaaaatagaagtagagggaattattattaactcatcctatgagagcagcattatcctattaccaaaaccagacaaagctattacaaaaaaagtactgaccaacatatctcatgaatattcgtgcaaaaatcctcaacacaacattagcaaatcaaatccagtaatggacaaaaataattatgccccatgaccaagtgggatttatcctagatatgcaaaggtggctcaacatgtgaaaattaattaatgtaacatatcaactgctaaaaaagaaagatcacatgatcatagaaacagatgcagaaaaatcatctgacaaaattcaacacccattcattataaaaaaaaaaaactttcaatgaactaggaatagatgggaacttcctcaacttgataaagaaaacctacaaaacacccgatagttaatacttagcggtaagaaactcaaagctttcccactaagattaggtacaaagcaaaaacatcccttctcaccattccttttcaacatcatactacaagtcctatctaatgcaataagacaagaaaaagaaataaaagccatatagattgagaaggaaaaaaaggaagaaataaaactgtctgttcatggatgacatgattttctatgtaaaaaatccaaaacaatcaacaaaaaatctggaattaataagcaattatagcggcattgcaggatacaaagttaatacacaaatgttcattgctgtataccaacaatgaacaagtggaatttgaaattcaaaacacaataccatttacattaacacctcaaaattgaaatccttaggtataaacctaataaaatacatacaagatctacaccaaaaaaacaaaacaaaacaaaaaagctacaaatctctgatgagagaaatcaaagaagtaaataaattgagagatactccatgttagggaggctcaattttgtcaagatgtcagttcttcccaacttgatctatagattcaaggcaatcttattcaaaatcccaacaagttatttcatagatatcaataaattggttctaaagtgtatagggagagataaaagacccagaatagccaacaaaatattgaaggagaagaacaaaggtaaacgactcatactacctgactctaagacataatataaagctacagtaatcaagacagtgtagtactgacaaaagaataggcaaatagatcaatggaacagactagagagccagagaatagacctacaccaatagagtcagttgacctttgacaagggatgaaagacaacacagtggagaaaggagtttctttaataagtgttattggaaaaagtgagcattcacatgcaaaacaaatgaatctagtcacagactttatacccttcacaaaaattaactcaaaatgaatcatagacctaaatgtgaaacataagattatctaaaagtcctagaagataacataggagaaaatctagatgaccttgtgttaggcaatgactttttaggtacaataccaaaggcactatccgtggaaaaaaaagtgttggtaagctggacttcattaaaattaaacttttttgttctgtgaaagacactgtctgcatgaaaaaacaagccaaagactgggagaaaatattttcaaaagacctaacagataaatatccaaatatacagagaaccctaaaactcaacaataagaacacaaacaacccgattctttaaatgtttctgaggacacttgaaaaaataaataaataaataaataaataaaaatgagccaaagactctaacagacacttcaccaaagaagatatacagatggcaaataagcatataaaaagatatttcacatcatatgtcatcagggaaatgcaaattaacacaacaacaagataccattagaatggccaaaatccaaaacattgacaacatcagatgctgacaaggatgtggagcaacaggaattcttattcattgagaatagtgagaattcaaaatggcgtgaccactttggaagacagtttgatgtttgcttatgaaattaaacgtacgcttaccataggatccaacaattgtgctgcttggtatttacccaaaaaacttgaaaaattgtgtccacacaaaaacaaaaaaacctgcacacaggtgtttatagcagctttattcataattgacaaaacttggaatcagccaagatgtccttcagtaggtgaagggataaactatatcttattagcactgaataatattccattgtctggctatccagtgctaataagtgctggctatccagtgctattcagtgctaataagaaatgagccgtcaagccatgagaaaatattttttgaaactcagtgaaaaaagttaaagaagccaatctaaagaggctacctacactatgattccaactacatagccttctagaaaaggcaaaactatgaagacaggaaaaagatcaatggttgccaggggttgagaagaggaagggataaataggcagagcacagaacactttcaggacagtgaaactatgctatgtgttactataatggttaatacaggtcattatacatttgtccaaactcatataactgtacaacagcacgagtgaaccctaatgaactctgggtgataatgatgtgtcaatgtaggttcatcagttgtaacaaatgcatgactctagtggaagatgtcgatagtcagagagagtatgtctctatgggggcaggggatatttgggaaatctctgttccttctgttcaatttcgttatgaaactaaaaatgctctgaaacaatagtctattttttaagtgactattaggtagaagaaaaaaaaaaacactaattgcagaaaaccaaacaaggcaaggccaactagactatgagcaactgctggctcctgctgcatgaactagacacttatctggtcacatgtgcctggcagcccgggtatttctactgctaatcagaaactggaagttattgaaaacagagctcagagacacaggacccactgagtcacattgcatctgagtttcacagaggtcaagggttgaggaatgatcctgacttaatcctaacaggtaacagtcactcggagagtgagagaagggagctagataggatatagatcagagaaaagagagaatgaaaggaaagaaagacaggcaaaatggcagctcgtagaagtatatcccacattctatctcctttatttgtcaaaacaaacaacaaaaaggattggtttccagagttctaaggttgctataatgcctaaagaaacatgggttaagttttggctacaggaaaatgtttgtatctatttgaagattaaccccctcccccctgcacacacacactctagagggtgagagagacgtggggacagccagccaaccttcttgtccctgggcctgcagcagcatcagggcacctggtgtggagctgtggctggaggctgattagaggaaggaggctctctaaccagctcaggtcctgcagagattgtgagggctcttctgggaaacagggacagggcagcaccaccagcatgacacagaaggaagaaagcacaggcagttctgaaaactccaccgaagggttgggggctggagagtctgcactgcctgctttcaggaagtgacccaacaccccaaagtcagaaactggggtacaccaggtgaagttgtagagaaagcaacaccagggtcccctcctgtgagaagcaatctatacctctgctggttataagtaagcaataaccctgctgaggggctcatgggtcctggaagagcacaggatgttgtctttttccctggaactaagacttgtattcatggaataggtggtagagtgtgagttgagcaaaaatacttcctaaattcccaaatgagttcagacctcattagcagagttctgtgtgatacattagctttgtactagaggagggatgttaaccctaaaagcattgacttcacactgtgcttgcaaaccaaaggacagaacttagagacaaatggtaccaaagtgctcaaagctgaaaacaagagaaccgaactctggttaatttaaaaagaaaagaagtataggacagatattaggtggctttagaaagacccaaatatataaaaccacatcaaatattaagggaggatgctatgtcaattaggataaggcttgacagcaggtgagagaaaaacaaagtaaccatggctcaaataaggtagaagcttattgctctctcattaaaaaacagaagttgatagtcccaggtaagtacaagttctgggtttcctcagtctcactgctccatatttctcttgaagcagtttccatttcatggtctaagatgactgtccaagctctagccatcacattcttatttcagctagcaaaaaaagagggagtgggaaagggcttcccagaagttaaagataccatttctttttacatcccattgactagaacgtagtcatatggccacagtgagttgcatgaggtgatggtggaaatcatctttattggcagagcacagtggctcatacctgtaatcccagtactttgggaggccgaggctggtggatcagttggggtcaggatttcgagaccagcctgtccaacatggtggaaccctgtctctactgaaaacacaaaaattagccaggcatggtggtacgtgcctgtaatcccagcaactcaggaggctgaggcatgagaatcgtttgaacccaggaggaggtgaaggtttccgtgagctgagatcatgccactacactgcagcctaggtgacagaatgagaccctgtctccaaaacaataaaaagagatcgtctttatctagaatagtcatgtgccccacataaaaaaaaaaaaaaaaaaaaaaagattttatgacaaataaagaagatgctgaaaagaaaattagcagttttgtccacaggggcctaaaccacatgaatactgatgacaattgtcaaaattcttacagctagtgtggtagaccagaaaccctctgaagcctgctgcctttctaggtaagaggggattgtcgcttggatccaaggggagaaacgctctaggacgttccagaattctggccccagaagcatctaaaaccctcattagcactgcaaggtaaacataatccttcctctgtctgcctaggcctggtgccttgaagcctcagcctgagcacagggacgtggtgtgttttcttcaccacttgatcctcggcttctagcccagggcctggcacacacagtgagctctcaaagacatgcttgtgaagctgatgaatgactgctacattcaactccctcccatataaatacataactatttttcacatgtatgtacatattaaaaagtagcgttgaattcacatcttttcttttcatgtgtattttactagggaatgtcgaagtgtgtgtagagacaggagaggcagcactcagattcttgggctagactgctcaggtttgactccctaattggctgcatgctagctatgtgaccttgagcaaggtacttaacttctccatgccttcgtttcttcattgtaaaatatgatcataacgatactgttgctcacagggttgccatgaagaattaatgagtcaacatttatattatggaaattgtgcatgtgtatcgcttaaaatagtgattggcacagagtgttcaataaaacaaaatattaaaagtacaagtaccgttttgcaaagtcattttttaatgtcgtaaagagattctcctcctgaacagagctgaaaagctgcaacctagcctagatgacttccaatttgacagctttttaggtccaagcatttcttaaaagtgctgtactcccaagagtgaggcagttcgtcatcttcaaaggcagtttgtgctgcatctcctgggtgtccagacctagcttaaagagatacgggttgttctaagagaaaagacacactcccaccctcttttcttggctaaggaacccagtgcagccactgactgtatttctctctccaactcttccacctgccaactcgcttgcttcatagcatctcagcagctgaccatattgcaaacagatcagtttcctttgatgccctggaccagacgaggtccatatgaggttctcaaacaaagcttttgctttgtttctaaacaacttaagaagatttcaaagaggaagacgtgctctattttctcaggatcccttttcctgctcaaacagaaagaaaagcccaagacccagggagggacccagtgatacagacagacagactttgagaaggagacaggataaggaatagctgcaaagcttagattacttcctaaaggatgggggtggaatatgtgatctttatctaatcagacagtctactcaggaagtccccgagatcaaagcaaggggctttttatttagcactgtgtcaacttgaaaacagtcctggcaaagccacagatctggataagctcacacctctccccacccccgctgccctgacctgtctctcagcatctgaactctcttaacattccatttagaataaaatcctgggttaaaaagagtccctgggattactgtaggaagagacaacatttgacaaagcaaggcagaaaacgccacagtccttcctgacttccagaacaattgggtgcatactctgggggaagacaccacccaggcattgtgtcacagcgtctcggaggaaaaataggaactaagagcaatcagaccacaacatggaatagggagggcaagagaacagagctacagtccccaaatattacttgctacaaagaataagagagtcggtagggttggggtatgtccttgtaaagcaggagaaacacattgaagaaatgtgttgaagaaaagacaggggcttgagaagactagggactggtccaaaggaagggaggtcacttactggaaacacaatgactcaggcggagcaaggcaagaaagttggaatcacactgcaaaggtagaaagagctcatcttcctggatgaaagactattgaaccgtggttcccataacccagtgtgttaccaaagagaaagaactcagccctattcctttcccaatgtaacttatatcctaccaaatccagtatctaccaaaaaacagataaatgcttcagtatgatactattcatatgaaactacgttttcttggccatttactttgttaggcaacatatagtatctcatttaatctttataactaccatacgactataattctcatttgataacctgcatttattcctttagacctgatttttcttatacatgtcatggactactcccagagttaattactaaaagaatgttcttaaatgagagtatttagtatttatcttggaaaaaaagccttcttcttcaatcccagaattttgaaatgaaggcttctttatggaagaataaactaaccaacagaaaatcattggtttattctttcataaatagatgggccaaaatatttttggtctcctctgaccaaaaaaattgttaatagcctgaatgataagaaatgcattctttcttgtgagtctttctgagtttctatttagttagctgcttttagggtgtgtgcttctctaagaaatgttatctatctcccttcctataaggacaacaacttgcagtggtgtgaaattattataagtcgagaagtatttgcagtaattgcttggtgccctataaaaacatactgtaactttcaggtactatccctgggacctagctgtgaaatcaactttcataaccctcacgaatgcttgtgtacctgtttacaacaagtggctgtttacaaagcatgtccccatgggttgtctctgactttcacagccccacctcacaggtaagggaacagaagatgacagcaaggaatcaattagcttaaaaattcacagagagttgtagggaacaattgccttgctagctgcaagatataactaaatgtgaggtgtgttttttaaatatgacttctagctccagaacttgtgcagcttaaaagtgataggcagtacccaaagatgcagaaaagaggatcttgtccacattttaggcaggggtgtagaatttaaatttacatccttacttctcactgaaaactaacaggtcttaattgtgattagatgagagacttttggaagaaactaagtttcagttggctttaattatgccttaatcatgctcatctatttcaaatattaaggaagcttgcactggaatgggtagaaagggctagaaaatgaaaaacaaaatgatgcctacaaagtgtcttcacaccgctttcaattttccaggcataatctcttcttgaggttggtgtcaagccaggtgtcaggaacagcacctagcaccactacagaaagcacctactaaacaaattattagatattacatacatttgaagctggaagcacgcttagaaataacctagtttaagtttcttattttctggatgagaaaattaaaccccaggaaggcaaagagacttgctcatgcagctgaagaaaaatacaaggatccctagctttgatgaccacattttaacaccatctgaatagaaaatatttgtttcttttcggcttcttatcctgttagtgcagctatttctctattgctgcctcaaagaaacaaatcagaatgtttctgtttattttataggtagtgttccaaccagggagctcctggatgcaaggaacagagagccactcgacctaagtgaccaccagagggtgcccacaggacagcccgacaaatggggtgaggtggggggatggccctggagtgtctcccttctcacgagaaacgcatgtggtatcacaactgagacttatcttttgttcccatcaagaagttagaggtctcaggtctcttctgaaatgcgaggttgcacatctgtattggggaagaaaatctgcaacacgtgccaacctcgtgcttaagatgtatttgtttcgaactcctgcatgcttgctcttctggtatctgtctccataaataaaatgggaagaaatatgtcactttgatttccacacaggcagaagagagttgtgattagatgtcatgagagggtccacagtttctgctacaggaaaggtgatagggggattataatattcacctttccccaacttgtttcctggaacagttacctagttgtccccagagaatcgataatgggtttagacaaaaaccctgtgttcccttcggaagacgaaattcctttcagaagaaagccagatccagaataatcaattaattccacctgtatcaaaactgtgacatgtgggtaatatccattcattccttccctttgataaactaggttcatccatttgaacctgatttttcttacatgccagtaattactccgagaactgactcttaacagaaaatttttcaagtataatatttgacatacactttaaaagaaaacattgttctttaatcccagcatttcaaaatggaggtttccttatgaatatagaacaccaatacacacgtcgaccatcaaaaaagtggtacctacaaagaggtagtcctatcttaccacctctttatagtcacatcttccacccaaccctcccaactccgggtaaccactgatctgttttccatcactacagtttttgaaatgtcatgtaaccagaaacatgcagtgtgttacctttttgtgagtggtttctttcgctcagcataaggcctttgagattcatccaagttatcatatgtgtcagcagtttattcttttttattgctgagtagcattccatgtatggatgcaccagagcttgtttatccactcgcctactaaaggatatttaagttgtttgtaagttttgggaaattatgaaaataattgctataaacatttatgtacagatttttatgtgcacctaagatttcatttctctagggtaaatacttaggagtgggaccgttgggtcatgtagtatgtatatgtatatattcgatttaagtatatgtatatattcaatttagtaagtatatgtatatattcgatttttcagagtggctgtaccatttccatctccagcatcaatatgtgagtgttccatacatacacatactcagttgctacacatcctcaccaacacttggtatgaattttttttattttagccattctaataggtatatagtggtatctcaacatgttgttagtttgatttccttagcgtttcatgatgttgagcatttttcatgtgtttctttgcctttcataaatcctttttgatggtatgcccagtcaggtcttttgttcattttttaaattgggttgtttacacatgattatctcaatagatgaagaagaggccttcaataaaattcaacaccccttcatgttaaaaactctcaataaactaggtattgctgaaacatacctcaaaataataagagccatatatggcaaacccacagccaatatcatactgaatgggcaaaagctggaagcatttcccttgaaaattggcacaagacaaggatgccctctctcaccgctcctatttaacacagtattggaagttctggccaggacaatcaggaagagaaagaaataaagcatatgcgaataggaagaggggaagtcaaattatctttgtttgcagatgacatgatcctatatctagaaaaccccattatctcagcccaaaagcttcttaagctgataagcaacttcagcaaagtctcaggatagaaaatcaacgtgcaaaaatcaccagcattcctataacaaacaacaggcaaccagagagccaaatcatgaatgaactcccattgacaattgctacaaaaagaataaaatacccaggaatagagctaataagggaagtgaagaacctcttcaaggagaactacaaaccactgctcaagaaaatcagagaagacacaatggagcaacatttcatgcacaaggataggaagaatcaatatcatgaaaatggccatactgcccaaagtaatttgtagattcagtgctatcccattaaactaccatcgacattcttcacaaattagaaaaaaaaactattctaaaattcatatgggaccaaaaagagcctgaatagccaagacaatcctaagcaaaaagaacaaagctggaggcatcacactatttgacttcaaactatactacaaggtcacagtaaccaaaacagcatggtactggtacaagaacagacacatagaccagtggaacagaacagagaactcagaaataagaccgcacacctacaactatctgacctttgacaaacttgacaaaaacaagcaatggggaaatgactccctatttataaatggtgctgggagtgctggctagccatatgcagaaaatcgaaactggaccccttcactacgccatatacaaaaattaactcaaaatggattaaagacttaaatgtaaaacccaaaactataaaaatcctagaagaaaatctaggcaatcccattcaggacataggcatgggcatagatttcatgatgaaaatgtcaaaagcaatctcaacaaaagcaaaaattgacaaacaggatctaattaaactaaagagcgactgcacagcaaaagaaactatcattagagtgaacagacaacctacagaatgggagaaaatttttgcaatctatccacctgacaaaggtctaatattcagagtctacgaggaacttaaacaaatttacaagaaaaaaaaccaaacaaccccattaaaaagtgagcaaaggacatgaacagacacttctcaacagaagacatacatgtggccaacaaacatgaagaaaagctcaacatccctgatcattagagaactgcaaattaaaaccacaatgagataccatctcacgcccgtcagaatggtgattattaaaaagtcaagaaacaatggatgctggtgaggttgcagagaaaaaggaaccctgttacattgttggtgggagtgtaaattagttcaaccattgtggaagacagtgtggtgattcctcaaatatgtagaggcagaaatatcatttgaccagcaatcccattactgggtatataccccccaaaatataaatcattttattatgaagacacatgcacacatatgttcactgcagcactattcacaatagcaaagacatggaatcaacctaaatgcccatcaatgatagactggataaagaaaatgtggtacatatacaacatggaatactatgctgctataaaaaggaatgagatcgtgcctttgcagggacatgcatggagtgggaagccattatcctcagcaaactaacacaggaacagataaccaaacaccatgtgttctcacttataagtgggagctgaatgatgagaacacatggtcacattgtggggaacaacacacactgggacctgtaggagggtggggggagggagagcatcaggaagaatatctaatgaatgctgggcttaatacctgggtgatgggataatccgtgcagcaaaccatggcaaacatttacctatgtaacaaatctgcacatcctgcacatgcaccactgaacttaaaataaaaattgaatttaaaaagtttaaaaaattaaataaaacctaattttaaaaagtaaaataaaataaaattgggttgttttcttactgttgatttctttcttcagcatttgtagcctttggcataaggatcctgcatgttatattggatttgtaacttaaacatttcattttttgaagctattgttaataattgagatagaatgaattgtgtccctgccacctccctgccaaaaaaatttatatgttgagatcctaactcccagtacttcagaatgtgactatatttggagatagggtttttaaggaggtaagtcaggtaaaatgaggtaattagaatggtgtaatgcaatatgactggtgtaagaagaaattaggacacaaacaggcacagagaagaccaggtgaagacaaagggagaagacagccatctacgaatcaaagaaaaagccctcagaagaagtcaacaccactaaaaccttgatctcacctttctagcttcctgaactgtgagaaaatagatttctattggtcaagccactcagtctgtggcactttgttacagccccagcaaataaatatagtaatatgcttttgttttttttcatttcagtttcaattgttcattgcttacaaatacaaacaacttgtttttgtgtttactttgtatccttgccaccctgttatattcactattagtcctaggagtttattcttaaagattcttggggattttctacataaacaatcatgtcatctgcaaatagagacagttttttttttcttccaattgacatgtcttttatttcttatttttgcaattacaacagttaggacttccagtataatggagaataagagggataagagtggacatccatttttcaccattaagtataattttagctgcggagattttcgtaaatatcattctcaacttgagaatgttcatcttgttcgttgagagcttctatcatgaatggatgttatgtttgtcaaattccttttttttttttaatcaagtcatagtcttgctctgtcacccagaccagagtgcagtgacacaatctcaactcactgcaacctctgcctcctaaattcaagcaattctcctgcctcagcctcccgagtagctgggattacaggtgcctgccaccacacatggctaatttttgtatttttaatggagatggagtttcatcatgttggccaggctgtctgaactcctgacctcaagtgatctacccgcctcagcctcttaaagtgctgggattacaggcatgagccaccacgcctggctgtgtttgtcaaattatttttctgtatctattgatatagtcatgtggttttcttctctcaattgttaacatgtggaattacattgattgatttttgaatactgaattagtcttacatttcctagctaagcctcagttgattttctacattgctatatttaattttctaatattatgatgtggacttttgcatctatatttatgagagatattagtctgtagttttaatttcttgtagtggcgttaattttggtatcaggaaaatactggccccataaaaaattggaaagctttggctcttcctttatctcctagaggagatcatgtagaactgttattatgtcttctttaaatgtttagtagaatatgtcagtgaaactacctgagcttgagatttccttttgtggaagattttaaactatggattcaatgtatttaatatttatagaactattcaggtatctattttatcttgggtgagtttagatagtttgtggcttttgagaaattgctttatttcatctggattgtagaatttatatgcactgaggtgttcatagtatttcttttttatctgtctaatgtttgcagagtctgtatcttttattcctgacattagtaatgtttgtcttctctcccttttttctttatcagtcttgctagagttcataaattttactgatcttctcaaagaaccagcttttggtttaatggatttgttgtattgtttttgtttgtttgttttcaactttaccaagtttttactatatctgcatgattttcttctgtctgctttcagtttgttttgctctttttttcttgttttaaggttggagcttagattgagttgagccctttcttattttctagtataagcatttaatgctctaaatttccttctaaacactgctttatctgcatcccacaattttgatatgttgtatttttatttatgtttgttccctctgttttctcaatcctctgattccactttcctgccttttagggaggttattaaacatattttagtgttctaagacattttacgtaagtctcagacagacattcccaacaaactatagacggtgtcctccagattcaagacatagctcaaattaatgagaaaattcaggagtttcctgctttaagaaaagttattacatcaaaaattttaagtgcatttccaatagaatagaggtgattctttacatcatcaaaatatttattaaacaattctatactgaagcaccacccagttccccatttctgataaagaaaagtctcagctttgccttggagaaggagaatcacctctgttccatacataattcctgtgatttgtgctatataaacttgtacttcatttttgctgaagctagttagaggtgttactgtgtgtgttttgggggtttttttgtggctttttttttttttttctgtcacttgcactgaaagagtcctggtgactaatacaaattcctctaacaggaaattccacagtgcttttttaagtatttttttaactttactcccttctttattttccgtgacactggtcagcaaatttcacaaagacaaggactgtgaccatcttgctcaccatgcaatattctgtgaccaatacctatttttgaataaatgacaggtctctggttttcagttgggatttgtttgggtcaggatgcaaatggattaattgacccatttaatataatgatgctggagcacgttttaatgttcggtctcattgaagaaatgaccgtaagtggtctgatcctcaagtaatttccagtatgacttctttccttgggccatggcatgcatttactgtgtccctgtagaccacaaaaagattttcctcccatggacaatttctgacaatgttctttgtggttttggaaatagagattacttacttcaaaattgtgttaacatgaattttgtctattaagatccatacatgtgtgttgggccaactatgtatgttgtggggcccagtgcaaaatgaaaatgtggggcccctgtcaaaaagcagggggtaaatgccatgaaaggtactgaaatataaagctgttttctctcttccacagtctccctcttgacttgtcatcatgttgtttatttgctatttaatgttgctctaagtaaacttaaattataattttaagttcttagcatgaattttatcattcatctttatattgtgcaatgccagttttaaatgcaaataaagagcttttaatgtgtgtgaagaatcaccaaaattaaaaaatttggatctatagctcatacatgtgtatgtatttaattcttaccagaccaatgaaaatgctgcacaaaactaacttgactgtttttgttttacttattcatatactcaacttctaccaacattccctaactggggattagtgatgaataaggaaggactgaaaagaaaagaaaatatagattatcctaccttttccactctatgtcattttcagcatatgtggttggctaacataggctatgataaggttttttgttcattcatgattcattcaatgccattttcttctttctgcattcaaagcaaattctggtgtgaacggaaagtttggcctttggggctgtcagggctgttgcttgatttgtatgttgtgggtataacatgcttcgagtcttcctgaactcctgtgcatcgccagaattccgtgctcatgggccatcataacactatacgcaaatgtgcagcaaaggagagcagacacacaaattcacattttgtacagaactcttctgcttatgtgcatgctccgtggctccatcagacttcacttacacaatacaacttaaaattattaacagcagaacatcccaccaagtgtggggcccttctgagcatggtccctgtgccactgcccatggatcacatgcccatgcagccagcctggcatgtacgtggagaaagtaacaataaagtgattctgcacttttcatttgttttgttattctacccacacttgactccctgggaaatctgtggaatcaagtgtgacattttgagatcattaactacttgacaggggaggagagagaaatttaaagcaaatgtgtcagaagtcatacctgattaaagatcaatccagaacaaagataaaggcaccttagaaattgcaacatcagtcaagagcaagatgagatttgagcccaaatattttagggaaaggtcagttatgtcaaggaacacagagctgctctctccaaagcatatttaaataaaaatattcacgttttttccacctgccacaaactctttacactgccttcttttaaaatgatatagttgatgtttcatacctaagctacgatgttcaaacttaaacagcttggtgccacaatggggttgttgttcatgtgaaaaataatgcctcgttgttctatcaacaaaaaagtacatattataatgagttaaatgtaacatgccctttacacaacataaaaagtatttcttgcttcgtttttattacttttttatttttgaatcttttaaaatgcatcacacacttactttcctcctcaacagtatccaatttagcctttcgttgaagactaaagattgtcaggttaaacatcaattatgatacttccaactggattcaacacgtatttactcagggagcactcacagggaggcattatgccaagagaaatggcaatgctattcagtgtttatgatcccaactggagaggaaaggcagatgcataatttcaaaattcctggcagaacacagcaagttccattatataaacctaaacaagtaccatgggaacacgtaaggatgggggagggagagtacatcatgggaatttgagtgggtcttgaaggataacctgtgatggtaagaaagggtgtgccaagctatggaagtcacaggtttgaggcagaaatccatgggtgtgaaatagagcagggtgtttcactagaaccacaggtcatatatttggcaatatatagaacagtgagagagagtggaactaatatctacaaaccacagggagctgtagaaggcttggtaagggaagatggcacctgaattacactttaatgcaataatgcattttgaaatgtgtaggactgtttgaaactgtcgtagtatagaaactgttgtactatttaatgtgttcttttaactggttattctgtcacctttctcttttggtctgccaactatctcttcttaacgctatcaaggtatatgactctagtagcatctacatctaactttctactaaaattctgcttctagtctactaaaagcttggatactaaataaccaagattattagtattatatttaaataagtacacataggctatgagaaatagactgaaatttactatttttctagactgcttactatttcacttagtgaaaaacaaggatttgcctaagactaaagcacatgggtctagtatccaaaaaagattaaaatttctaaaggaaacttctggttaaaagtagaattgactgtgactatttcttcttcctacccaaatctcattaaaatgacagtcaaataattttaagaaacaaattcatagacaaggtcaaaaagaatgagagaccatttgtcataaatgttttcaacacatttttggaaggtgagaaatggatggaagaatggtaattaccttggcagaataaagcaaagggaaaaccaaatgctttcagacaagcaagaacagagcagcttcactctgcaggagctctaaattgctcagtgcttataagcagtgagtatttcaagaggaagatgagagcaaggcccactgtggaaaaagacatttgttgaaagtctaccacagcacagctgagcccattaagtctcctctctcattgtgtgcatccacacaactctttaccagcttcctggaagaaagttgaaggtttattctttggagtaaatgtatttggggagcatgaccagagaagagcatagataaagcaaaggtgaagtaaaagtctactatggacaccccccattcccttccctatgctccttccagaactctcccctcacctatgcacacacacacacacacacacacacacacacacacacaaacacacaccctggcaggagatttagatttctctccaaatagtacaaagaaaaggcctatagataatgacatttacttcctgataaccctatgatgaagtttggagaaaagccccatccgtgattttagagtacccaatcatagtgtcttactcttgaatataaacataccaccagcgatctgcagagtctccagcatgaatgaatgaaatcaaaaagaaaaaaagagtaaatgtaggaattaataaaaaatgttaaaaatagtattcatgttctcagataagaaaagatattgtatcatgctgttgtgagtaatgaacacagaggaaaaaaaaagagctcttgaaaataaaaaaatataattactgaaatacttttaaatgtaatagaaagttgacaaggttgaaaaaatgtccagagagaagaggcaaacagcaaaagcaaaaagaaactaaggaaaacaaattagaggatcaatccaaccacctccaagagaagttggaggcagacagaacagggagacaaacagagagaggagagaaaattgtcaaagaactcatgcaagaaaattttcccggaactaaaagaataaatttccaaactgaaagagttctctgagagtctaagacaataaaagatgaaaaatttacaccaaggtgcatcactgagaaatctcagaacacagttaaaaagaagatcttaaacgcttccaggaaggaaaaaaacacattacatagaaaagaatacaaatccaaaaggcttctcaataacagtaagtttccagggggcccaaaggagaatgagtttcaaccagggctgcttcctgggtgtgctaccactgacatcacatagggccccgcattcagaagggggcctcacacttggctttaatggtgtggctgccattttgaaattcttaatacttttatctttgaatttgttttgtaagtaaagaccaatagcacagtagtgcatgccctgagcagtcttggctcatgccccgtcctgccccctgcctcctcttatctcccagggatgggttcttggctacctcctcccctaacgccacccagagatcactgctgccctgtgcccgcagtggaagaattgaggttgggccagcacatcctacacacttagctgcaagtcaggactctgatgcctatgaaggtctacactcacccctcaagtatgccagagcctgaggcagtataacattaactaggaaattagacacatcatgaaagtttgagagagaccatcctagaaaggaaaaagcttttttcctgttctttgtaaaaaagacttttaagtatttattttgcattgggctctacaaattatgtacccagccctgatgtcaatgttttctgcctaaaaagtgagattttttttttgtatctcaaaaatctcaactatgagtatcactaaagataaaaagagcaggtactcctaacattggttgatgtataactacaccagaatggttccagtgtgaaccctgggcctcccagttgggggattcccagtttcaatgagtctcttctgagccacactctgtctactggatttgaatgctggcatcaggcatccagccagcaatgatttctgatgaaataaaacagtttcagataggactagatgtttccaagggaatccatgagaagatttccaggttcgatgtttttgatgtatgaatagaggcaccagaattcagagggattctggggttttgtaacctcaagttaaagcaaaaccatctcaagtggggtttgagaccctgaaaatggcttccaggaacgaggaggatttccttctctggggaattttaagaggaatattctggctcacctggaaggacacagttttgaccagaggcaacaaggtggggagacccagacagactctctaagcccctcccatcttgtgagtctctgattttcagttttttagacgccgaggtcattgccagctatgagaagagccaagtctagaccttgccctttgaagtaagcactgctacttgcttcacacagctcctcattcccaaagcattttattcttccctgacaccttccccctcactgccacccccaaatctcagacctcactggatatggtgacctgacaactgccctttacatggggatttgtatggtaaattgccactaagaggcccctgatccacaccttcctcaccaatttatgctgtcgtggctttcagacagaaactggggaattcacatgtggcaggcttggcggttcatcagacaggttctattaacttggtcaccaggtggtaaccatattatttcatgcttcttggtaacttttgtgcaacacaattacctttgacagttcttgagtgggacagcaattttcagcaaatgttttcggtaaccagaggccagaaggaaaggaaatgtgagtgcttcagttaagctttgagtgtggctctgacagctcttcagcacctctgtcgtgttataaataggaatttggtggaaatttagtacacatggaacttacaaaagggggttgagcaaggctgatgatggcttctactgcatttaagaaagcatttgtccttacgttaccagaaaagggtcctgatcgagaccccaagagagggttcttggatcttgtgcaaagaagaattcgaggcaagtacataaagtgagagcaagtttattaagaaagtaaaggaataaaagaatggctactctgtaggcagagcagcccttagggttgctggttggctatttttagagttatttcttgattatacatgaaacaagggtggattatttgtgagttttctgagaaagagacaggcaattcctggaactgagggtttctcccctttttagaccacatagggtaattttctgacctgccatggcatttgtaaactgtcatggtgctggtgggagtgtaattagcatataatgagcagtgaggaagaccagatgtcactttcatcgccatcttggttttggtgagttttggccagcttcttcaccacatcattttctcagcaaagtctttatgacctgtaccttttgccaacctcctagcccatcctgtgacttagaatgcctgacctcctgggaatgcagcccagtaggtctcagtcttattttaccagcccctgttcaagatggacttgctctggttcaaacgcctctgacatacagtataataagtcctaccatgatgaaattcttctgagctccaaaatacagtaggttgcaaggattttctttcagtagggtttcatgctaaagatgttttgacatccttcacaccaattcctcattgcaaagaatgtgacattcacgtcttggacttgcttgaatttacagtgccttcagcattccttgaagatatccaagaaagatgcagtccaccctccaagtattgatttctaatctcaggaaaaaggtaagcagtcatcacagatgggctgttccaaatctggtcttacagagtaagcaattgaattgcttctccacactcctcaccatcaccaccatcaccaatacacctacacacaaacacacatgcacacacaaatacacacacccatgcatgcacacatatacatgcaatagccactttctaagcacaaaacaaaatacctgcagtctctaatcatacatcataggaaaggaaaagagcgatttgcccaccaaatcatcaggtattaaagggattgatcacacacaattggtaaatctgctgagtttaggactggcagagttgaacacgaggtcacatggccacaaatacatcctggagcatatgctgtgacttgaatcccattggcctggtacacagcaaaacttccctttgacacacccaagagaagagtctggactttgctcccatttcatgaacaatgtttcacaggcaagctttcttttgatctccagtgactagacacatgatatcatcagctctaaatcaagccacatttttaccctctgcctgaaatggtgaggacaacgccagctaatctgtaacatgttgcagatagcaacatctcctgggaccatcatttttcaccttctttatttgtttagcagccactttgtcaattaaagctggtgatattttccccagactcagagaacagaattttgattataaacttttccttcatatctcatccttaccaaagtttgacatttagccattactgattttgaacgaattttctacatgtctgggggctttgttcttgccttacatgtgatttttttttgtagacaccaataatacaaaaagtgatctgcataggatatgatacagaataactcaagtagacatggcctttcttcccccaaatgaaacaagtgacagtatgtcaacctttcataagtgttgaacattcatcttctgcttggtttagatgatgagaggagggacacaaaagccagggattatgtatgtaaccaagtagtcccagctcacgctcaatatgaaaacagttaggttgaagtcttttgcttgattcctttaaaaatattaatagcagtctggagtccttttttctcttattatagaaacacaaagtatgtctgttacacaagcatgtcaggaagcacaagcaagcacaaaggagaacaagaacaaacaacccataaatactccaattttttcacctggctgtctctactacagagtctgaaaaaggccaatactatccagcctccttgcagcttaggtgggcatatgacacatttctagctaatgagacctcaacagggaaaaacaggaacaaacacaaaaaaacatctggggagattccagattctcccatcttccttccttgatataagcttcagctgctgtcttgagaccatgagacagttagccagcctagcatgaggaagacagccaatatattaaggatgacagagtgggcctgcaggcatcattgcaacaccgaaccaatgccagcaacctcctacctccagatgttttatcaagtaagacaatcactgcctacttatttcaacgactactgattgggttttctgttatatgcagcattctaactgatactcccaactatctaacaaaaactccatcataccagtatacattattcaagtgtgtttgctttttttttttgcttagatttaccttttggttatttttttatttttatggatatataatagatgtgcatatctgtgaggagtagctgatattttgacacaagcatacaatgtgtaattatcaaatcagggtaattaggttaaccatcaccttaaatatttatcatgttttaggggttataagccttccaattccactctcttagtgattttgaaatatacaataaattattgcgaagtcttttgcttttgcagaagatcaaatacatgtctttttgcttaagctgaaacattacaaatttaccactgaaatcaacttcagtaatgattttactcttataatgataataatacattatattctcatggcaccttagctttcattatctcattaattgaattctcattttggaagtaagaaaaatgtagcacagagagattaagttgcccaggaagtagctggggcttaaattcaagtattgtgactacaaatactttcctctttcagtaatattatgtgctgagtcttcttcagtgagttctagcaaatctgcagacctacagcttggggaatgagtaaacaggagctgtcagttctaaagtcagcctagctatcaaccacattgagagcaaaattcatttctcaagcaggtcaccaagactgagcatagagttcttccagaggtagcacttgaataatcatgtcatcaaatgtcatcgtggtagcagagaataagcatgctaacttttcccagtcctccagaaaaaggatacttttgtctttccttttccaatttcttttacccatttgggagagtatgccacaaatgtggtttttaaatatatgaaccgatgcttttatcctaatagttaagaacatggcctttagaatcacacagagctgaattcacatctagcttcaccacttactaggcatgaccgttggcaagttaacttcttgggattcagccctcttttccgtaacatgagggtaacgtagtcacaatatttcaaggaagttttggggactaaatgagaaaacgtgagcttgaaaaagtggggcatattttttatgttctctgtggtctcttccaattctgtaactctgtaataggattcaacaaacatttcttgtggacttgtaatgtggccttatcttgcatgatcctcagagtaaccctatggagttaaaccatcccaaaccttagcaacttgaaacaacaaacttctatcatttttcaaaattctgcagatgagttggttggttcttctcatctgagctggcttggccaggctctctcatgcatctgtgatgaaacggaggaacagctgttggctggctgttctaggatggccacaatcacacatctggtagttggatggctatcagtgctgcaggatgactagcaggtgttctcctcctcccgcaggctagcctgggctggtggttcactttgtggtcacaagagagtgagaaaaagtgtgcaacaccccttgaagcctaagttcagaactgacacatgttcatttctgccacatttgattagtcaaagcaagtcccaggccagcccaggtatagcaggcgaggaactagactccaccccttgatgagaggagctgtaaagtcatgtgcaagcctaggaagactccgtggccattttagcagtcgattaggctactcagccagttttctggagccacacatgtgggctggccttcccaagtcttctccgcccaaaaagccagacagagtttgtttttccagcagggcgcatatcgcaggcctgggtgggttgtttgtttttgtgtttgttttgacttttagctatttccaggatgtttctttcatggaggagaacgactcagttctgtctgccatgtgtattaagatgagctacaagagagcattgctttcttgtaatgcaagaaatgcaatgtagtcagaggctctgaaatctggtggggacagcggcagcagagactgtgacagcctcgggacacaggaggccaccttggtcttcagtcttaggtgcctggagctaccagacagccaaagttgcacaaggcacaggcatgacctgccaggttgcccagccaggccagggatgacagggcacgttcacctcaccagctaatcagagacaatccccgcctgaggaatgagcggaactcccagccctcagatgacgctgggcttgagttttctctgctagcacatttggagatttcacaagagccataaaagtttgcaaagggccttggagtgcctcattcaatgaaatcacaccctcccttctggactgggttaaggaggggtcacacacacccgacagggtgcctccagatgggggtgtgtagaggatgggtccttatccagctccggtcacttctcaccccttccaaaaacccactgtgggccaggacaaggagaaacaagagatcgtgactggcagagatataggaaggaatgtcccaaaaagagcaaaaaacttgctctcatgtactttgctgactgagcctctgggaatggagccttctcctgaggaaataccacaacatggctcagaggcggaaggctccgagaagggtcctggcaagtaggggaaaatgtcccttcaacggcctctctgacctcaggcagagccccactcagtgacattcctgggtgagtgggcaaaatgagaaattcctcctacaattctctctgcccacagaaggtattaaatgaggtccggcaagaggccaggatcaggtaagtctagaggccagaaacctcagccaggcctacccagcactcaggaagagcagaggctcagcagcccctgagggaggcacagcttggctcttggaaaatggccctactgggcctcattctccaggtacttggtttttggctctagagacaatgctgagttcagttctcacccatgtgaaagttttcaaatccaaaagccagggagacgcctcacaccatacccagacagagggacaaggaataaaactcacccacttcctttctatgcgtttctccctgcaggctgcggttccaccgcttccaggcggctggatggggccgccccacccccgccccgccgcccccgcccccgcccccactgtggttcctgctttcctcagtagcaaagtgcttcagatgtgaagatggcccacccgtgtcctgtgatgtggagctccccctcgggactcagggaattgggcgtccacctcctcacagcatcacacccctttctttcacctgcaattcccattcgccaagcattggctgcgggtctcccagcagacggttgcatcctgactatagaaagaaagacattagggatcccaacaagtggaatctattcctgcagaatccaggacttgggaggattcccaaacctgactgggcagccagcccagtttccaaggtcatcactagggccagcaagcccctctgtgggtcctcccagcccaccgggcttctgcgcacttcctgtcactccccactgaggaatgctctcactggtagtccctctgcttgtggatgtcctaccttctcccttttctcaattgctccacccagaccgattccatcgttccttcatttttttagagagcattctcttttctagtatttaattgactttttgattgtgtgacaccaataggactctcatcctgatatggggagaagcatgacctctagacggccaggaagtacccttgatcttgacctgcaagctctaggggacagtcttagggacgacctcaagattacagaatatctatatttgcgcacacacacacgcacacacacaccctcctgcctggattggattcccaagcccaagttttccttcaacacaacatttggaattagacttttcagatcctggtaaaagcatgcaattaatttaagtaaatggaggcaaaggggagggagggtgtctacataatgggatggaaagttggtagggaacaggtagggagagagactcttcatgggaaagagagctaaaatcagagattctcaggagttaacagaaagatctgcctgtacagatatctgtacccaggagaggttttctggaatgctgtctttattctctcaaagatctcctagcctcatttgataacatcctatctcctgggaagaaaatgtgagattagcccatggggtcaatatgaagcgtgaggcagaagttccctgaagccaagttccccggcatcctttgccttcctcatgttccccgagggccttgtattcccaacgtgcctttccccttgcccacagtgctcgcgcctctccatctgtgtgggctatgtgttcactccacactgagcacactcagcggctggcatgattcatggccacagcaggcccagaaattggtcccagtggtctccaaggtttctctggcttgaagcacatcgaaggccctcaggctccccggattctgctgagctcagatcccagtaaggaaatccagcctcacacaggcaagcatgtccagttaaactgctccctcccccacctccccagcctcctcatgcacatttacacacattcactaggctggatgcctagaaacatcaacctgcctgattctgcctcttaaaactggtgtttattttcgttcaaaaaaaattggaaggacagtgtaaccacattgtaggtaatgaagaaaagagttaaaaatcatcattctcagtccatctaccctgacccaattatttttacttctgtttagtcctgatttgtatgcatattgatttttaaaaatagcagtcatcagaacgtggggaatttgttggcttttttctccaagtcagttgcattttctgacctgtaaggcctttgggtgctggagttcaccaatggctggctggcaggaccacacccaaacgccaagcccctggaaccagctcgcaaggcaatggagaagggcaaatactgtagtgcctccatccctcctggagccaatctaagcatccttaacctccatgggggactggggggaaattgagttgtctccctgagttgaacacctttgggtgtatccaatgccatggctccagccctgttccctggcatatctacactgggggagggagggaggtctagcacacaccttttcccagctgagtgatgcaaggctggtaccctgtagaacagagccatcagtgtctctggagaatggcccctggcactggaatcagagtgagtggaacaccagatgcttgttcgctgagccaaccccatcagttccactgattccccaaacctactgggttttcctaactcagcttgaggttacaggggggcagctgaggatggtgagcaggacccagtggactgaccccactgctgtcccagcctcctcacatacagttggtctctttggtgataacacttagcttcctctcagtaggttaaaaaaaaaaaaaaaaaaaaaaaaagaatgaagaacaggactacttggccgacatactagctaagagaaaccttggaggcagctggagggctactgcccatttgacaggggccatgcttccaaacacaaatattaaccttggcaatctgactgtcttctgcttcatgacttacacagtgctttttggggtcatgtttaagttgggaaagagagaggtgaaggaaaaaagatacaaagtctcctggaacaactgagcttttgatttctagagagtatttaactggtaccagtgttcaaaatccaccctggttaaaggccactacttttctgcttttcttgggcagaatggattgtgtagataaatccaagtatctcctcctcctggggtcctgaggctggagataacaaaaaataaaaatgtcaacacctggatttttggtaaagatggcaaaagcactcaagtgatgactaatccccatgacttgaaactgggaaccttgggaatcagcttcacaaagcaggaagatgtttttctgcaccataatcttccccagttgagcccacagccaatgagcctgcatctaacccattagcgaagccaaatccagaagatggcagagattccgcccacagcactatgctagcagcactgccctatagggtgtgtcaggagttcagcgcatccagcgatggaaggggagagtcctcctgacaacttcaaggttgtcgaggacagcaaaactcaacattagtgctggaggctttgaaactggcggccccagacctcagcagtcatcagggcttcagagaagccagaaaaatatgtgttgcatctgttaagtcattgtttagtggtttatgacacagttaccttagttcctcaagatacatataatttggggcccctttccaggagggcatttcaatacaccatttgaaccaatgattccacttttattaatttgcctttaggcaataatcagggctgcctgtgcaatcttaaccacttagaagtttgactgtgttcataagagtgaaacatgaattagctaaatacattatgtaccgacaagcaatatgtagtcatttaaaattatgtcctaaataatttaatgtgaaaagtgttgatatggtaactgaaaaggtgttatgaaacagtatgcatagcatgatcctgaaatgactgcaaaacactgtgtacagtacgatgctgtttttgtttaaaatgcctatatgtgtttatacagtcacagaaaagaactctgtgaggggagtccttctttgcttcccacattcctgcctctactcacaaaacaggagcttcctccaactctctggctttttcaagtactaaggaggaagtgcccactggggagcagaccctccactttagacagaatggcctattggtcacattaacacacaagtagatgggagtcattgtgcctgaaaacctaaaacaggaactcctcctttcctgggctctccaacccactccctgaaggccataggtccttttcctgcccaaccacgtctcttctttctggttctagagtctcagattgtcttgggtaagtgaaaacactcatgctctccctgagccccagttgcctcaatttgagcaattagcaaagtttattggccaggcacggtggctcacacctgtaatcccagcacttcgggaggccgaggcaggtggatcacttgaggtcaggagttcgagaccagcctggccaacagggtgaaaccccgtctctactaaaaatacaaaaaattagctgggtgttttgtggcacttgcctgtaatcccagctactcgagaggctgaggcaggaaaatcgcttgaatccggggggcagaggttttagtaagccaagatctcgccattgcactccagcctgggcgacatagcgagactttgtctcaaaaaaaaaaaaaaaatggataatttttattccatttgcctcaattcctcataagtgccagttagactcctggaggggaaaagaaatgagtggtagaattcagtcaacaattcagtcacctgaattcagaatggcataaggcagtggttttaagagatatttgcgcccccaggagacatttggcaatatctagaggcattttttgttgtaccaacaggattagggattgaggagggtgttgttaccagcatctagtgggaaaagaccagaaagactacaaaataccctacaatgcatcatccaacccaaaatgttgaggtaatgacaatgttgggaaaccctagttttaaagatctatgccaaagtgttaacagcagcttgtcttctattttctatatttgtaatttttctacaatatttgtgtgttgctttactaaaaaggaaaacaataaaagctacttttacttttaagacaaagtggccatagcatgtcagaagttcagatgtggccaaatgttggtgactgttgataaagaaaataataaacctggttcttaccaacagcccttggcactctttggaaccccccgtggaatgaaaatagtgactaagaggaagagagattggatttgatagagtctactcatagacatgcattattaaaaaagaaacttagcaaggcaacccgtgcctagagacctagcctagtggatttcacgttggctgactttttttctgttcactcaaatggtatgaatttttagctgctgacaccactgtatgggtggtgtggggcatgccagggagcatctagttctggctccataggtttattatggctggccagtcctaattaaaagactccctttgtcttgtcttcaggacttccagacatggaactggggctttatttttggctctgggcatctatgctgcttcctgttatgttgccagattcatacgtaagctaaggcagccctagaggaatatttccctccctttattcttattccttagtacagttctggatccacagccaatcaagcgtatcatagaagagccagcaactctgacgtgcaaaacgcccatgtcctgccacccccaacatgctggtatttttgacagtcctcaattagagcagtacggttaacttcagcctgtcatttgtgtgggttaagctgtttgaaaaatccttgagggatcagccagtggtgggaggatgattttcctataaacaaatgatggaacctcgatgtctggaagatactagctgtggtttggttcctggggccttttgaggggacagaaatgtcagctcccttcttccttggctctctgggctgtctcacagctgggactgatgctctccattccagcattggaagaccctcaggaggcctccggaccacagagatatctggttccagtttcattttatcattgctagtgctaaaggtgtaacatttatccccaagtgactatataaaataatttcttcaagggagatcctgggtatgaagttcatataaacacttcagaatagctagaaaagtttattttgattttagaataatgtttcacaaggactgagtcaccaaaaccactcttcccataagtccatttcactgggagaatatttatacaaaaatccttaatattggggtcgtgggagggaaagtgtgcagataatgtaaaaggattttaattccgaaagaaacaaagaaaaaaagaagaggaccagcatatccagttttgttttacgtgatctgaaattttatctgatctctcagtagattgttaccaaaatcctgatattagaaagaagtctctatccattcacatataacatgatagtctatgtagaaatttgcaagaaatctacaaaaaagcaccagaattaatacatgagtttatcaaggtcacgggatacaagatcagcatttaaaaatcaatcatatgtctatacattagcaatcaactactggaaatcaaaattttaaaaaataatacggtttaaaaattacatagtctggacatggtagctcacacctgtaatcctagtactttcagaggcaaaggcaggaagatctcttgagcccaggagtttgagacctgactgggcaacatagggagaccctgtctctataagaaatttaaacattagccaggtatggtggcatgcacctatagttccagctactcaggaggcagagcccaggaggctgaggctgcagtgagccgtaatggtgcctctgcacttcagcctgggtgacagagcaaagtcctgtctcaaaaaaacaaaacaaaaacaaaaacaagatgtaattatgtatacattttaaaatatatgcagaatctgtataataaaaactccaaaaactaatgaaagaaagaagatctaaataaacggagagacatactgcatccatggactggaagactcaacaatattaaggtgttaattttcccacaagatgatttaaggatttaactaaatttcaattgccatcccagttaacaatcttttgtacacatagtaacactgactctgactctaaaatttacgtggaaaagcaaagaaacttaaaagaggcgaaaaatgttgaaaaaaataaacttgaagaaatcacattatacaattttaaggcttactttaaagcaataataatgagaaccatcacaatttaaaacttacgctctatgaaaaaagaatgaaaggcaagctacagactgagataaatatttgcaaatcacatatctgacaacttatcatcataatatataaagaattctcaaaaattcaatagtacataaacaaaaagactaacctttagatttttatttttatatatatatacatttttagagacagagtctcactctgtttgttacccagaatgagtgcagtggtgtgatcatagctcactacagccttgaactgctaggcacatgagattctcctgccttagcctcccaagtagctgagactataggactacaggtgcataccaccacatccagctaatttattttattttttgtagagatgaggtctcactatgttacccaggctgatcttgagctcctgggctcaagtaatccttgcaccttggcttccaaaagtgaaaaaaaaaaaaacaaaacctaatttttaaatttttaaaacctaaattttaaaagagttgaacaggcacttctccaaagaagatataaggatggcaaataaacatatgaaaagaagctaaacatcattacctattaaggaataggaaactaagtccacaataagataccactagacacacattagaatggcttaaaaaaattgacaacaccaagttttgacaaacatgcagagctactggaactcacatgcattgccagtggggatgcaaaatagtataaccagtctggaaaactacttggaactttcttaattaattaaacatatacttaccatatgacccaaaaaccccatccctggatatttatcctggagaaatgaaagcctctcctcacacagatacctggtcacgaatgttttagcatctgtattaataaatttccaaaattgggaaaaaccaacacatccttcagtgagtgaatttgggatactattcagcaataaagatggtccaagaaacaaatcagacagatcttaaaggcattcgctgcataaaagaagccattctcaaatagttacatattatatgattccatttatacaacgttcttgaaaaggtaaaactataggaactgagaatagattagtggttgcttggggtgaggagagaatttgcctctaaaggagtagcattgtggaatttggggggctgttggaactgtctgtactataattgtggtggtggtggttacttatatctatacttgtagcatactgtatacacatgaaaatgtcaattttgctctatataaattgaaattttttcaaatttaaaagtaagctttgtgtcaccatagaacagtgctatttttaatagaacatttgatgatggaaatgttccatattttgtatccaattctgtagccactagtctcatataactagtaagcacttgaaatctggcaagcatgacagaagaactgaatttttcatttcatttaattttactgaatttaactgtaagtagccacatatagctactagctactgtattgggcagcgcacccacagaagactgaaatttctatattgtgttccagagcttatccaacttgtgctgatgcagaaaacaggaatatctagaataatgagaaatcaaaaattcattacatgtatgctcattaagaatgcactaacttttaggccgggcacagtggctcaagcctgtaatctcagcactttgggaggccaaggtgggtggatcacttgaagtcaggagttcaacaccagcctggacaacatggcgaaaccccatctttacaaaaaatacaaaaagtagccaggcgtggtggagcacgcctgtaatcccagatacttgggaggctgcggcataagaatcgcttgaaccccagaggcagaggtagcagtaagccaagaatgcaccactgaactccagcctgggtgacagagcaagactgtctcaaaaaaaaaaaaaaaaaatgcattaacttttagattttatagcagatgttgcttgcaggttaaagttttctgaaatttgggctcaagtaaatttatattccttcagcatattacattcaatgaagtgatgggcctgtgtgctggagcagtcagaagacacaccactagcctgttgggtggctttagaagccagtctgtggccttttttaattgtcataagtaattcaaaagcaaaccgtggcatgttgactagcttgggtcaaccataacaagtaatgatgctgtctctcagacattgcagaaccattgaaccagtgttttaagataatacacaagaaaatacaagattctttacaatccagtcctgatcacatctcaccactctctatatctacagaggaatttgtaatttctccatcatgcacctctgttgtttgctttagctgtcaattccacatggagttccttttctactctcttttagtgtgataaaaggtgccttccctggagcgggcaaggtggttcacatctgtaatcccagtgctttgggaggccaagatgggaggattgcttgagaccaggagttgaagaccaacctgagcaacatagcaagatgctgtatatacaaaagaaattaaaatagtagccaggcttactgggcacctgtagtcccaactactcaggaggctgaggcaggaggatctcttgagcccatgagctcaaggctgcagtgagctatgatggcactactatgctccagcctaagttacatattaggtgacagagcaagattttgtctcaaaaaaaaaaaaaaaaaaatgccttccctgtctctgttgtagtgttcccaaacatttgagtatctcccagtcatttgagtatcttcctgatcttgtgccttgtctccatccttcctatactattactcaccttcatatttttaatttggctcaccttcatttacttaagtttgtcttaagcaatactatctgtgacatcatgggtttcacatgctagttatatttttgctaacacacattaagtaaataaatgtatgtataaggaaagctatttcgccattcatgccctaacataaactcacatgccaatgtgggacacattcatcagcttggtaacaacttccatagttagctggagtatctacacctccaggaagtgggtgatttgccccctactgctgcagcaataaggcacaagtcctgttcaggggattggaagactgtttgttgggtaaatcaactgcccaggctctgacatttgaaagtcctcccacagagcatctggcccactgcctgattctactgggaagctcccttacatataaagctttcaatcctattttaagtactttattataaatagtaacagagatccaaagaccaccagacatttgaggaatgcctcccacataaaagacagaaactaaaataaagaaagaggaaaaaaagtaatacgaaagacacagaaatcatgtggggttcagaagaaaacttcaaaaagtctcacaaaacttaacatccttagatttaaatgagaaggtgatgcatctatgagacaagaacaaagtactgtcaaaataatgaataaggtaataagaaaaaaactcatcaatttttaaaaggatagctcatttttttgaaatcaatagaaagcttggaaaataaagtagatgaaagctcccagaaagcagaacaaataaacagcaattttttaaaagagtgataagatgagagtcttggagaaataatctaaaagattcaagatccaaataatagttattccagagatgtagagaaaagaaagagaaggaaattatcaaataaataactaaagaaaaattccatgttgaagaacatgtcttgaggtcaaaacagtccaccaagtgacccccactctgagactcattgaagtaaagagaagatcctaaacactaccccacagaaagagaaatgtcacttacaaaggattggaaatgagatttccattgcgctagtcacagcaacctgtgctagaagacaatgaaacaattgagttttaaccagaaatctacaaacagacaaattacaaataattgtgaggggaagaaaaaagacatttccagacacattcctaaactaaaaaataattgcctctcatgtgatctttcttaggaaaccattaaagaacataatcctacaaaaggaaaaagtgcgccaagaaaagtgaaggatgtggaaatccagaaatggagatcataaggtgatggtgaagaaatatttcaggatgtcaactgcacagcagccctaaagaccgcatcaaaacagggtgatggagggatccggcaggaaggtctttagagaaaaaaaaaacggaacaaagaaattatatgtttgagttttggaaaagctgtcagtgggcactggcagatctaatggataaaattaaggtgagactcaaaaactgcagctgaaaaacaacaaccaaataaaacattgtatgagaaagagaatcacagttccctacttggttctaaaataaaccatgtttatcaatcataataatatgaagagtgacaatttagctcaagattgtgatgttataatgttaggaaaatagagggaaaggaaaaggggagcaggcatatggcggtattatggtcttaacacagcaggaagttagcacacagggtctaaaatggataaatccagaaagaatataagcaaataattttgagcagtaagacttgagcataggaaggggtaaggcccttgctactatggggcatttatttaatgtttgagttatatccacatatgttattttaaaaaaacttctaaaattagagagagaaattatggttcctgggatatagatcagagagcaaagatttagttgctgagaggactcataaattgcagcaaaaccatctttctaaaggctcctttctgcaacactacctccagatgataggacaatattacacaagggaagagagggaaaaccgtgcccaagctccaccctctcctttgggaaattcttggctcagctcgcaatactaaatctttgttccatggtgttttaggactgcactctttgaaggtgagatgtttattttccatggctggaaagtttcctacatccctacccactacacatgactgaggaattgcacaagcctcagcgtgctttctccaacactggtatgtcaagccctggctgcaaattatgtgtaatgtgatggcaaaggtgcctttggagtgctccatggactggctctgtctttcatttcagccaggtgaatggctcaacatatagctagggatctgatggtgggggaatgacaacttaatttaactgcacttaactgccactgtgtaattctttctgctctcccaagcccctagtcctgtattatcttggtcaaggagatcccccagttctaaagagtcctatggagatttcataggactcctcatattggccaaaaaatagctatgttgataccatgtgcaaactttcttgtaactcaaccactgttgcttcctaaatggtgacagctcattacagtcatctgctattacactaaaatgctgttgggatttcatctcactctttattcccactggatatttggcaggagagctaaggttttgtctagtaaagcactcttaacaaaaaaatagagaaaggacaagaagagagaagcatcacaattccatatcttgatttgaggatgtgccattgagatgttaatgtcttacataataagaggttttatggcttaaattcaagagttgggaatgcagcagctgttatcccagtcaggtctacagttttcccagatttcacaatgaacaataggagcaattgttgtaaagcacagtctcttcattcagcatggcaatgtcagggaagtaatatacctttctatactcagttttagggaactgggttttggaattgaggagctgcctgcagcccagcctcataacttacctatcaaaactaagcctagctcaacatgactttactgtttattccagaaaattcttgcccagtaagtaacttgaatgttggccccaagagcttccagaaaatctatttttttcaaacaatgagctaccaatcagcctcctttctcaggccaacagattgctccatggagcagaccttcttgcttatcaaagcatgagatgctctagataacacttaacttttctgggtccttcaggcccaagctattaaatcatgaactttgcccagatgaaatccccacattgaaaggcctgccttaaaccactcaaaaccagatctgaaactctatccatatctgcccttgacctcttccttccacaataccaccaagagtctgtcaaggtggtgctctccctcatggcagtaagtaataaacccagcttgaattgatcaatggggtatttctgtggtctttttgtagagttggcagttgacaaacacatgcagatttccacccttgtttgtagagtcacaactgttagcttggcagtcttgctctgttagccccttttccagttctttcaattatttactctttcattcaaatgtttattgaatgctactgtgagccaagggatataagaagcttggttcctcattccatggagtagggaaggaagacacaaatcaacaaatcatataaatatagatgatactaaattgtgctaaatgctataaaggaagagtatgggatggcagaaaaacatttaataggcttacaaagatctgcaaaggattagaccattggggctgagataggaagaattagtaatcttcagataagtctctgaaaaggaagaaggaagacctgttccaacccaaaggaacaaccccccacccaccccaattaggctacgaattcattatcatgctcttcaattcctttatcttcaggatcagataactattttgttgcttttggctacttgtttttcacaacaatgaaaaagaaagataaatgtgcttcaaataactgaagagaaaagacaacaaatacatgttttctcactgttaaattcccttttctctgagattctttaaacccctgataagaaggggacgtgataaaaatggaagatcaattactctgcaaaaaagtctggagattgcttatagtcttatatacacgtaaaataccatatagcccagaattttcattcctaggtatttacccaagagaaatgaaaatatatacccacgcaaagacttacacatgaatatctacagccctgctaatcttaatagccccaatctgaaaacaacccagtgctcaacagtagaatggattaacattcaatgcaatactatacagcaaagaaaattaatgatctactactacatgcaacaacatggatgcatctcacaaacacaagaaaaaagtcagactagaatgaatatgtcaggcctctgagcccaagccaagccatcgcatcccctgtgacttgcacgtatatgcccagatggcctgaagtaactgaagaatcacaaaagaagtgaataggccctgccgcaccttaactgatgaaattcccccacaaaagaagtgtaaatggccggtccttgccttaactgatgacattaccttgtgaaagtcctttgcctggctcatcctggctcaaaaagcacccccactgagcaccttgcgaccctcactcctgcccgccagagaacaaaccccctttgactgtaattttcctttacctacccaaatcctataaaacggccccacccttatctcccttcgctgactttcttttcggactcagcccgcctgcacccaggtgaaataaacagccatgttgctcacacaaagcctgtttggtggtctcttcacacggacgcgcatgaaatttggtgccgtgacttggatggggggacctcccttgggagatcaatcccccgtcctcctgctctttgctccgtgagaaagatccacctatgacctcaggtcctcagaccgaccagcccaaggaacatctcaccaattttaaatcaggtaggcggcctcttcttactctcttctccaacctctctcactgtccctcaaccactttctcctttccactcttcaatctctcccttctcttaatttcaattcctttcattttctgggagagacaaaggacacacgttttatccgtggacacaaaacttcggcgccagtcacggactgggaaggcagccttcccttggtgtttaatcatggcagggatgcctgattattcatccatgtttcaaaggtgtcagaccacacagggacgcttactcactgcagggacgcctctctgatcattcacccacgtttcaagggtgtcagaccacgcagggacgcctgccttggtccttcacccttagcggcaagtcccgcttttctggggaaggggcaagtaccccaaccccttctctccttgtctctaccccttctctgcttttctgggagaggggcaagtacccctcaaccccttctctccttgtctctaccccttctctgctttcctggggcagggtcaagtacccctcaaccccttctccttcacccttagcggcaagtcccgctttcctagggggcaagaaccccccaatcgcttatttccacaccccaacctcttatctctgcaccccaatcgcttatttccatgccccaacctcttatctctgcgccccagccacatctccggcacacaagaacttccaaacacctgaaccgcagtggccaggcattcctccagaacctcctcccacaggagcttgctacacgtgccggaaatctggccactgggccaaggaatgcccgcaggccaggattcctcctaagccgcatcccatctgtgtgggaccccactgaaaatcggactgttcaactcacctggcagccactcccagagcccctggaactctggcccaaggctctctgactccttcccagatcttctcggcttagcagctgaagactgacactgcccgatggcctcagaagccccctagaccatcacggatgccgagcttcgggtaactctcacagtggaaggtaagcccgtccccttcttaatcaatacggaggctacacactccacattaccttcttttcaaggacctgtttcccttgcctccataactgttgtgggtattgacggccaggcttctaaacctcttaaaactccccaactctggtgccaacttagacaatactcttttaagcactcctttttagttatccccacctgcccagttcccttattaggccgagacactttaactaaattatctgcttccctgactattcctggactacagctatatctcattgccgcccttcttcccaatccaaagcctcctttgcatcctcctcttctatcccccaccttaacccacaagtataagatacctctactccctccttggcggccgatcatgcaccccttaccatctcattaaaacctaatcacccttaccccactcaatgccaatatcccatcctgcagcacacttgcctgttatcactcgcctgctacagcacggccttttaaagcctataaactctccttacaattcccccattttacctgtgctaaaaccagacaagccttacaacttagttcaggatctgcgccttatcgaccaaattgttttgcctatccaccccgtggtgccaaacccatatactctcctatcctcaatacctgcctctacaacccattattctgttctagatctcaaacatgctttctttactattcctttgcacccttaatcccagcctctcttcgctttcacttggactgaccctgacacccatcaagctcagcaaattacctaggctgtactgccgcaaagcttcacagacagcccccattacttcaatcaagcccaaatttcttcctcatctgttacctatctcggcataattctcataaaaatacatgtgctctccctgccaatcgtgtccaactgatctctcaaacccaagcaccttctacaaaacaacaactcctttccttcctaggcatggttagcgcggtcagaattcttacacaagagccaggaccacaccctgtagcctttctgtccaaacaacttgaccttactgtttaagcctagccctcatgtctgcgtgcagcagctgccgctgctttaatactttcagaggccctcaaaatcacaaactgtgctcaactcactctctaaagttctcataacttccaaaatctattttcttcctcatacctgacgcatatactttctgcttcccagctccttcagctgtactcactccttgttgagtctcccacaactaccactgttcctggcccagacttcaatccggcctcccacattattcctgataccacacctgacccccatgactgtatctctctgatccacctgacattcacatttccccaaatttccttctttcctgttcctcacccagatcacgcttgatttattgatggcggttccaccaggcctaatcgccacacaccagcaaaggcaggttatgctatagtacaagccactagcccgcctcttagaacctctcatttcctttccatcgtggaaatctatcctcaaggaaataacttctcagtgttccatctgctattctactactcctcagggattattcaggccccctcccttccctacacatcaagctcgaggatttgccccacccaggactggcaaattagctttactcaacatgccctgagtcagataactaaaatacctcttagtctaggtagacgcttttcactggataggtacaggccttccctatagggtctgagaaggccaccgcagtcatttcttccgttctgttagacataattcctcagtttagccctcccacctcaatacagtctgataacacataagcctttattagtcaaatcagccgagcagtttttcaggctcttagttttcagtgaaacctttatatcccttacggtcctccatcttcaagaaaagtagaatggactaaaggtcttttaaaaacacacctcaccaagctcagccaccaacttcaaaaggactggacaatacttttaccactttcccttctcagaattcaggcctgtcctcagggtacagcccatttaagctcctgtatagacgcctttttattaggccccagtctcattccagacaccagaccaacttggactgtgccccccaaaaaaacttgtcatccctactatcttctgtctagtcatactcctattcacctttctcaactacccatacatgccctgctcttgtttacactgccagtttacactgtttttccaagccatcacagctgatatctcctggtgctatccccaaactgccactcttaactcttgaagtaaataaataatctttgctggcaggactatgctgaatctccttaggcattctctaatcagatatcctgagtcatcccagttcttagaccttttacacctgtttttctccttctgtttttccatttagtttctcaattcatccaaaaccgtatccaggccatcaccaatcattctataccacaaatgtttcttctaacatccccacaatatcaccccttgccacaagacctcccttcagcttaatctctcccactctaggttcccacgccgcccctaatcccgcttgaagcagccctgagaaacatcgcccattctctctccgcaccaccccccaaaaattttcgccgccccaacacttcaacactattttgttttatttttcttattaatataagaaggcaggaatgtcaggcctctgagcccaagccaagccatcgcatcccctgtgacttgcacgtatatgcccagatggcctgaagtaactgaagaatcacaaaaggagtgaatatgccctgccccatcttaactgatgaaattccacaacaaaagaagtgcaaatggccggtccttgccttaactgatgacattaccttgtgaaagtccttttcctggctcatcctggctcaaaaagctcccccactgagcaccttgagacccccactcctgcccacctgagaacaaatcccctttgactgtaattttcctttacctacccaaatcctataaaacagccccacccttatctccctttgctgactctcttttcggactcagcctgcctgcacccaggtgaaataaacagccatgttgctcacacaaagcctgtttggtggtctcttcacatggacgcgcatgaaagaatacatactgcatgattctgtttatatgaaattctagaaaaagcaaaaacatcagtggttgcctagaattagcagtaaagggagattgactgcaaagggtgtgaaatagcaagaaatatatatatatatatatatatatatatatttgtctctccccctgtttcttgcacagagctcctaaaacctttataacttcctgagagatagtggtagggtgctaagagaatcttttgttctaatatttggtctctgtcctggttcctgagacagggaccctaatacccttgtagattggggtgatctaggggaatcttttgttctaatatttggtctttgacaccagatcctaacatactgctctttagatttttgtgaacctgagtgataggagtagctggcacagagctcccaaatctctcagaatttcctgggtgatagaagcatcttttgttccaatgagacaactcttgttgggctcctacattgggggtggtcaccagaaagaccaaatcttgattacaagcttggaactttcagctccacccacactctttggagaagaaagagaggctggaaatggacttaataatcaatcatgcatacatgatgaagtcaccataaaattccccaaactatggggttcagaaagcttccagtggggtcaatttattcatatgctaggagtgtggtgcaccctaactccacagggacagaagctcctgtgctctgaaatctttgccctgtatatagctgttcatctgcagtttttgttataccctttattaatgaacccataaacataagtaaattgctttcctgagttctgtgactctagcaaattaatcaaaacaaaagaaggagtcatgaaaacccccaatgttttctggccaattggtcagaagtctaagtgacaacctactactgtatttgcaattttcagttagcatcagaagtcagggttggggaagggtttgtggaactgagccttcaacctgtgggatctgatctagctctaggtcatagtgtgagaattgagttaaattacaggacacctagttaatgtccaatgcagaattgcttgttagtggcagtgcagggagggggaacccacacatatctgatgtcagaagtgttgcattgagtagtgtgtgtgagtggaaagaaacagttttgttttttcctcagaaatgagcattaaggaattttgggggtgatggaaatgtctccagcccatcagaatccatcagaaaactacttacgcaatttatcaagaatgccaatttcttcctatgaggagatttgtatataataactcacaaaaaaggtttaatcccagataaggtttgggatattttttcttccaaatatgcatgcactaaaaaagagggatttaaaaaaaaaacaaacattttaaatgttatctgttgtgattatttgtcagtgatggggttgtaaaggaattttattttcttccttgtctgcagattaacatttttctggtatatggatgtcctgcttttggagttctaataataagaaataaaagtttttacctttatttaaataaagaattcccattttgcattataaaatgtttgatgatgagaaatgaagtaagaagtatgaatgtgctggtgtgggagcctgtggaagagaggaccatgtcatctcaactgtcctgagctgagcagtgaattgcggtcaggaaggggaggtaattccttagggaaggaagggtatggagagtcagagattaatggccccatggccatggcaggagtggcagaggctgattaggtcttgtcagttctccccacatcttttgtccccatagtgaccaaagatagacagatagtcaaggtccacctgatatatagcagcctgccctgtgtgcctgcccgtaggcctaagatagctggactgaagctaagtctacatatctgacccccgagatgggtcaacttggtatctccccaacttggtatcaacttggtcaatagacacctgtgtccattgaaagaaaagagaacttgaagtgacctggggtagtttgctgttcgttagattgctgtacctactgcatttcccaaggccaagttagaatgcccctttctaagtaagtgtattcctcatgtcttggccccacagcaggtttctgtgcatgtgcactagaactttctcctgtttgccactctggctacagccacgaatatgctccattgaactatttttttttttctgagccaagttgaaatggttgcatgcctaaatattatgagtcagcaaatgaaaagatggattttgactgataattttcagaacaaacagatcaatttaacttgaataaatataattgatgatggaaaattcaattggaccaaagaatatctttgtctcttattttcatataatgtttggctataaagtcttccattggctctatctggccaacaacctacacgtgatttcaaattcaagtttcttattttcttaacttttcatattcaacttggatcttttatacttatctatttgttctttattcatttgataaatatttgttgattgcctattctgtgccaggaattatcctagacattaggaattgagcaatgaatgagacaggtttggtctctagattcacggagcatatactctaatgtaaaagatggacaatgagcaccaaaaaaagataataatttgagagagttgtgagtgccataataaaaagtaaaacaggataacaaaatagagagtaactggaatgtacactgagtatatttcagcttgatgtgtcatcaaaggcctgtctgaggtggtgatagttgagcataggcctgaatgattgaaagaaaaggagagcatcaggacagtcacagggagtgacaggtgtgaaaactccaatgcaggaacaaacttggtgtgttgagggggcctaggaaaggccgcagtggcgaggggagagctgacaaaaaagagaggggagaggtgggtttgaagaggcacagggccccgggccatggaagatcttgtagggtatggtaagaagttttgggtttatttcgactgaatggaaaaccactggaaacaagtagggaagagatgtgatgatttatgtgtcttacgaagtctggctgtggggaggagaacggcctggggataggaaaggaatggaggcagggagtctagttagaaggcagaagatgagacaacacaagatgatagcttgaactgaaatggcagtggaggggatactgaggaagacagagattcaggatatgtttgcagagatgaggaaaagacgggattcaaagacaacatttagatttttttacctgagcaactgggcaagcgagaacaacatcagctgaaatgatgaattctggggagagaacagtttgtggacagaagggaaatagaagacttggaatatgttttggacatatttggaaatgctttattaggtgtcacagtagagatgtcaagtaggtaatctggagtttggatgcagttcaggctggacatttgggaggcgtgatatttgataaagctgtaagatttgataagatcatctgtgaagaaaagagggctgagaaccaagccctgagaccaccaatgttcagaggtcaggaagagaacagaaaccatcaaaggatactgagaaggagaaaccagggagggatgaggaaacccagaagaatgaagtgtctaagaacccaagtgaagaaagcctataattctaaaccttctactgcttcctacttatttctaatttctaccttttatctataaacaatcctgtaagcagtgtttgcactatttcagccccaaaacacaccacacccagacctactgaaaagatatttattgtgattaagtctttggaccatagcccaacatcttcctagccgcctatgtggttgatttttctttctcctgcccagggaaaggtcagccaaacacaagtccctgcataatgtgacacaggtcttcttcatttcacccagcattgacttccctgtactaagaaaatgagcatttaatagatacactctctccgacaaaagatgggatccagagaacattcttatagttgcataccaaaaagcatttcccctttccttgcagagtctacgcttctcttggtaccaagagggttttgcctgatttgactacacacacacacacacactctctctcacacacacactaactcaggtcaggaattaaaaactttgagcagctcagtaattggttttaggagtggaagtaccaaatgctaccaccattcagctcttgctaagccttgggcattgtagctaatcatttagtaacattgaaaggctccttttatggaggcttccccatcatcaatgaactcattttatataaatatttagctaggcaataaactggacagcctatattactcaacatcagcctcaaaagaccctcccgattttatatacacagcatcctggtagagtaatagattttacacgcatgacatggttagcggtaaatacaccagggtaggtcaaaccctgtttggttctctgcttttaactgtcttgggctttgtgtgtttctttaatcagttggatgatttagataaacaaaatgtattagtctttgtaagtataacatgccttgaactttttccagatattcattcccattcatcatcataatagttgctcccccttggccatcattaagattagaaatgtccttgaaccatttaatgatattccacaagactggacagacttttcatgccttgatgaattgcgatcactcagcttagaccaatgaaattggatatcctttaatgtgcctgatgactttaaggaatttaggaaaagcagtgctgcagcatcaaaatggcttcacagaataaccatccatttggggaaagatgcatggcttatgtaaaaattgatgaatgagttagatctaatctaatagctaactgcaatgagtattatttatttgttcatattgctaaatatggttttatctacaagtgactatttattagagcactcattagaatccttaatgaaggtatgaactgatttttttaaagcccaagttagaatgctgaaggaagattcctccaagtaaattgacttttagctgttcacaccacagatgatgggaaaaaaatgaaaaacttaaaaacaaggctgggccaggatatgttccagctaccccggagctatgaaaaactggttgcttctattttatggggtcctgcatctccaaatggccactgattgacccccaaagttctgcaatacataagcaagcagacttgacaatttgtgccataaatatctttaatattttcacaaatattttgattccataggctctgaaaccattgacattcccatggtgtagagctgcctattatattggcatatttaaatcatctttaagtttcttcctaaaccatggtttgagaccacaggattaagaacagaaactcccaggtgtatagtagagagcactgtgcttggagtaaaaagatcagccttcaagtcctggtgttatcataggcaatttaattaaattactcacagaagcatcagtttcttcctttattcatcaattatttattgagcatctataattttctgagcagtattcttgggatagatgagagaacaaaaaagaatacagggattacactccactgttggccttgtttaatataactttcttccttccagaattgttgtataggtcaaatgagacatcaaaaataaaaccactttatagagagctttggggcaatttatacactaactcctggcagccatgagttgagggctgctccagggaatgtcacttctgtcctgccacaggcagagcagtcttctgcattttggagcgaaccctgaggtaggcacagatgcagatagtggtggttgcaaattagctgatccacactggaaacagtagggaccaggggatatggaagggaactgtcagtgaatgatgcagacatgaaaagataaacccatttttgtcattactctgctggttaggtggtgcctgcctgtccccttccccaacccctgtaccctaatacacaccagccacctgcaggatggcttgcaatgcattagtaactcttctcatgaatcagctggacctgaaatactctagacttgagtttctcacactggagtttgtggctcctgtgggtctatggatgtagcctccaaaaccatgaattcaatgacaatactacaatttttaaaattttcattttgatgacaaactaaaataaattaatacagatatattcagggtgaccttgtgactagtcatagtaggcaatttcattttctgcatttgtatttgaggttgaagtaatggtgatgccaaatgaagatttcaggtagctggaaaagaaaaaaatggaaaaattgagagatgaccaataatgtatatttaagggctaggtgcaatggctcaagcctgtaatcccagcactttgggaggctgaggcaggtggatcacttgaggtcaggagttcgagaccagcctggccaacatggtggaacctcgtctctatcaaaaatacaaaaattagctgggcgtggtggcacatgcctataattccagctactcaggaggctgaggcagaagaatcacttgaacccaggaggtggaggttgcagtgagccaagattgcatcattgcactccagcccatacaacagagcaagaccctgtctcaaaaataaataaataatgtatgtttaaatgtatgttgaacattttaaaagcctaggtgggcttatctgtatgttcatgttctgagcagagatggtgcatgggtcacatctacgtatatatcaaacttggttggcaataaatgtagtagtcaactctcagtaatttttcatgaaatggctgtgtcgcaatttcccagggtgtttattaagtggattggctgagaataaataatggataggtagtttaaaacaaatgtattgtccaaaaggaagtgcaatgcaaatcataatgttgacaactcagatgatggctatcaagtttaaaatcaacaggatcaagtcaactaatgaaatattgtttccaaataaatgcttctataataaaagcagtacttctgcttctggaaagatgaaatgcaggtacttttccctattctctccattaagtgtagctaaaacactgggcattatatataaaacaaatatgagtagagttggaaaggtggagaaaagaaggtggactaactagcgaccctgggacctgaggaacagtacggtggtgagttctgtttttattctgcctcatctatcccatcaaatactactcatactgagaaccaggaggattgcaatatgaatgacaaaagacaatcaacagatgtcaacacaaagataagagaattatttgacaaggattttaaagcagccattataaaaattcttcaacaagcaagtttgaacatgcttgaaacaaatggaatatattaaatctcagcaaagaaatataagatacaaagaaaaaacacatggaaattatagagttgaaaacacaataacccaaattaaattatataataatttaaggtaaaccaataaaaacaaaacataatgtaacgtaatttattatatcattattaacatgaactttattggtctggaatcttatattcacttggaaatctacttagatgtataattgtacaacagctatatacataaaaagcttatacctttctatgtttgtacattttgaagtggcattattttaaaataatttatgttaatactaaggaaactgaaaattttttcttttataaaggtttctcattaaaacaaacattttaaaatgacatttataatgtattatgagctaaattatgttcccccaaaatccatgttgatgtcctaagccccggggcctcagaatgtgactttatttgaagacacagcctttacaaaaaaagtaattaaggtaaaatgaggtcattagagtggaccctaatccattacgactgatgtccttataagaagaggagattaggacagaattcaccagtgtaaccatctagtactaggctttcttcctgggagattttttgattactactttaatatcagtacttgttataggtctatttagattttctatttctttttaagtccgttttggtagttgctgttttctgtaagaatttgtcaatttcatctaagttgtctgattagttggtatacagttatccatgccatttcctttatattcttttcatttctgtaaggtcaagcagtatcatcccctcttctatttctgattttaggcatttgagtcttctctcttttttcttggccgttctagctaacagtttgtcagtattattgatctttttgacaaaccaacttttggattcattttctctattgtttttcaattcgttatttcattaattccctctctaatccttattatttcctctttctacttgctttgagcttcgtttgctcttctttctccattgtcttaaggtagaatgtttggttgttgatatgggatctttcttcttttttagcgtaggcatttaaacttccctgtgagcactgctttcaccgcatcccctaagttttggtatgttgtgtctttgttttcattcatctcaaaatattttcttattttcctctgcttttatcttagacctgttggttatttagtagtgcgctgttaaatttacacatgttcgtgaatttcccaaatctttctgttacttttaattttattctcttgtgatcagaggacgtatattgtatgatttcaatccttttaaatttattaaggcttgttgtatagcctgacatacagtctattctggtgaatgttccttgtgcacttgagaagaatgtttattctgttattgggtacagtgttctattgatgtctattaggtctgctttgtgtatactgttgttcaagtcttgtatttccttgttgatcttatgcctcattattctatccaatatttaaagtggaatatttaagtatctgaatattaatgttgaattgtctgtttttcccctcgatcatgtcagtcatgtattttgggattctgctgttaggtgcatatatgtttataatatttataaattcctaatgaattgatcctctcatcattacattgtatgccctttttatctctagtaatatattttgttttaaaatctattttgtctgatatttgtttagccattacaacttccatgtgattactgtttgcatgatacatcttcttccacctttttacattcaactaacttatatatttgaatataaagtataacttctgtagagagcatataattgcatcttgtttttcagtctcgtctgataccctctcagcttttgactggattacttaatccactcacatctgtgatgattaattttatgtgtcaacttggagggtgttttaacatgaaattagtatttaaatcagtgaacactgagtaaagcagattgccctattctgtgggtgcctcgttcaatgaattgacagcttgaatgaataaaaagactggcctccctaagcaagagggaattctccagcagatcaccttcagacatcattggcactatcggctttcctgggtctctgtctgctgatcttcagactataaccgtatcctgggctctcctgagtctcaagtctgctggctcacactacagatttttatttgctaggttttatattcatttgagccaaatccttattttatatatatatgtaaaacttattttataaaactatatcatgttatatatgtatacacatatatgtaattttatatatatacatatatatgtatgtatgcatatgctactgctttttttctggagaacactaatacaacatctaatgttattattgatatagttagatttatattgccatttaattgttttctatatgtctcatgtgtctattgtgttcctctattcctattttactgctttattttgcattgtcagtatctctagtgtaacattttaatttatttaatggttttttataacttatttagtttgttttctctcagtggttgctctagggcttaccatatacatcagaattcatcagaatttacttcagatttatactaacttaattccatcaagaaacagaaatgttcctcctgtatagctctattacccattcttcctttctgtgttatcattgtcacacatattacatctatagatgccataaacctaacaatacatcattataatgagtacttaatgtaatttttgtctattaaagagagataacaaagaagagtaggtatttatttgtagcatttgttctatgtgctttcttatttatcatttctagttctctttatttgttcccatgtgttcaagttatcatctagtatcatttcctcactccagtacaactctgcctccacccatctcctttaagtggttgttgtcaagtacattgcatttccatctattatagccccaacaatacaatgatacatgtagtgttttatacacttgatttataaaattaattaagacaagaaagaaaaatatatatactgtctttcataattgcaattatcagtgctctttgttttttctctatggactcaatttccatctgggtttacttgctttcagcctaaaaatttcctttagtatttatgataaggcaggtctgatagcagcaaattctttcagttttttttttttttctggatatgtcttgatttttttcttcatttttgaaagacagtcttttaagatataagattcttggttgattgttgttgtttatttcagcactttgaatgtgttgctccattgccttctgacagccatgatttcttataaaaagtcagttgttcattttattggggttcccttataaatgacatttttctcttgctgctttcaaaattttctccttgtctttgaatttcagtattttttctatgatatgttaaacagaaaataatggatctctctgtttcctacttgagtttattgagcttcctgagtgtgttttccagcaaatttggggagctttcagctgctatttcttcaaatactttttcttctcctttctctttcttttcttcttctagtacttccattatgcatatttcagtttatttacgggtgttccacagtttctcaaggctcttttttcttcattttattttctcactgttctccagatggtataatccctatcagtctatcaaatttgcttattctttattctgccagtaaaaaatctcctgttgagcccctttaataaagttgtttagttcagttgtacttcttgacaccagaattaccatttggttctatttttatgtctatctctttattgatattctatatttgatgagatattgtcttcatactgtacttctttaagcatttttaaaaattctttgagcatatttataatggctactttaaagtctttataaaatctgacatttggtccctctctgaggaagtttctgttgactattttgtgtgtgtgagcatccgtgtgtgtgtgagagagaaacagagagaaataacaagtcactgttcctgtttcttttgctgtctcgtaattttttttttttttttgagacagagtcttgctctttcgcccaggctggagtgcagtggtgccatctcagctcactgcaagctctgcctcccggggttcacaccattctcctgcctcagcctcccgagtaactgggactacaggcgcccgccaccgcgcccggctaattttttgtatttttagtagagatggggtttcaccgtgttagccaggattgtctcgatctcctgaccttgtgatctgcccgcctcagcctcccaaagtgctgggattacagacatgagccaccacacctggcctctttcgtaatttttttaaaagtggacattttaggtaacattttgtagcaactctggttattagttcatctcttccctttctgggtcttgtttttgttgctgtttctttgctcatttgtttggtgacttagctagtccattttgataaaaccatttctctcacagtgtaaagccttggctgtcactcctcacaggatgcagccttgggcatgcacctgctcaccctggaattaaaataattttagcagttttctttgattgtctctttcccctcatatcttcattaaaatgtctgtccttttcatattatacccagcaattaggctccactaattaccactaattgttctattgttttggaaaatgccctctgatataaattactcagcagtataattgggctggggtagtttttaaagataggtgtgttgtgttttgttttgttttgttttttactttaagttctgggatacatgtgcagaatgtgcaggtttgttacataggtatatatgtgccatggtggtttgctgcacccatcaacccatcatctacattaggtatttctcctaatgctatccctccccgagccccccaccccccaacaggctctggtatgtgatgttcccctccctgtgttcatgcattctcattgttcaactcccacctatacatgagaaaatgcggtgtttggttttctgttcctgtgttagcttgctgagaatgatgatttccagcttcatccatatccctgcaaaggatataaactcattcttttttatggctgcacagtattccatggtgtatatgtgccacattttctttatccagtctatcattgatgggcatctgagttggttccaagtctttgctgttgtgaatagtgctgcaataaacatatgtgtgcatatgtctttatagtagaataatttataatcctttgggtatatacccagtaattagattgctgagtcaaatggtatttctggttctagatccttgaggaatcaccacactgtattccacaatgtttgaactaatttacactccaaccaacagtgtaaaagcgttcctaattctccacattttctccagcatctgttgtttcctgacttcttaatgattgccattctaactggcatgagacagtatctcattgtggttttgatttgcatttctctagtaactagtgatgatgaatttttcatgtttgctggctgcataaatgtcttcttttaagaagtgtctgttcatatccttcacccactttttgatggggttgttttttttttgtaaatttgtttaagttccttgtagattctggatattagccctttgtcagatgggtagattgaaaaaattttctcccattctgtaggttgcctgttcactctgatgatcatttattttgctgcgcaaaagctctttagtttaattagatcccatttgtcaattttggcttttgttgtctttgcttttggtgttttcatcatgaactctttgcccatgcctgtgtcctgaatagtattgcctaggttttcttctagggtttttatggttttaggtcttatgtttaagtgtataatccatcttgagttaattttttataaggtgtaaggaaggggtccagtttcagttttctgtatatgaccagccagttttcccaacaccatttattaaatagggaatcctttccccattgcttgtttttgtcaggtttgtcaaagatcagatggttgtagatgtgtggcattatttctgaggcctctgttctgttccattggtctatatatctgttttggtaccagtaccatgctgttttggctactgtagccttgtagtatagtttgaagtcaggaagcgtgatgcctccagctttgttctttttgcttatgattgtcttggctatatgggctctttttctggttccatatgaaatttaaaatagttttttttctaattctgtgaataaagtcaatggtagcttgatggggatagcatagaatctataaattactttgggcagtatgaccattttcacaattttgattcttcctatccatgagcatggaatgtttttccatttgtttgtgtcctctcttatttccttgagcagtggcttgtagttttccttgaagaggtccttcacaacccttgtaagttgtatttctatgtattttattctctttgtagcagttgtgaatgggagttcactcatgatttggctgtttgcttattattggtgtataggaatgcttgtgatttttgcacattggttttgtatcctgagactttgcagaagttgcttatcagcttaaggagattttgggctgagacaatggggttttctaaatatacaatcatgtcatctgcaaacagagattatttgacttcctctcttcctatttgaataccctttatttctttctcttgtctgattgccctggccagaacttccaaccctgtgttgaaaaggagtggtgagagcgggcatgcttgtcttgtgccagttttcagggaatgtgtccagctattgcccatccaatatgatattggctgtgggtttgccataaatagctcttattattttgagatacattccatcgatacctagtttattgagggtttttagcacgaagggctgttgaattttgtcaaaggccttttctgcatctgttgagacaatcatgtggtttttgccattggttctgtttatgtgatggattacgtttattgatttgtgtatgttgaatcagccttgcatcccaggaatgaacccaacttgatcatggtggataacctttttgatatgctgctggattcggtttgccagtattttattgaggatttttgcatcagtgttcatcagggatattggactgaaattttctttttttgtggtgtctccaccaggttttggtatcaggatgatgctggcctcataaaatgagttagggaggattccctctttttctattgtttggaatagtttcagaaggaatggtaccagctcttttttatatctctggtagaattcagctgtgaatccatctggtcctaggttttttttggttggtaggctattaattactgcctcaatttcagaacttgttattggcctattcagggatttgacttcttcctggtgtagtcttgggagggtgtatatgtccaggaatttattcatttcttctagatttgctagtttatttgcatagaggtgtttatagtattctctgatggtagtttgtatttctgtgggatcagtgatgatatcccctttatcattttttattgtgtctatttgattcttctctcttttcttctttattattctggctagcagtctatatattttgttaattttttcaaataacccgctcctggattcattgatttttttgaaggatttttcgtgtctctatctccttcagttctactctgatcttagttatttcttttcttctgctaactttgaatttgtttgctgttgcttctctagttcttttaatggtgacattagggtgtcgattttagatctttcctgctttttcctgtgggcatttagtgctataaatttccctcttaacactgctttaactgtgtcccagagattctgttacattgtgtctttgttcttattggtttcaaagaacttatttattactgccttaattttgttatttacccagtagtcattcaggagcaggttgttcagcttccatgtagttgtgcagttttgagtgagtttcttaatcctgagttctaatttgattgtactgtggtctgagagactgtttgttatgatttccattgttttgcatttgctgaggagtgttttacttccaattatgtggtcaattttaaaataagtgtgatgtgatgttgcgaagattgtctattctgttgatttggggtggagagttctataaatgtctattaggtctgcttggtccagagctgagttcgagtcctgaatatccttgttaattttctgtctcgttgatctgtctgatattgacagtggggtgttaaagtctcccactattattctgtgggagtctaagtctctttgtaggtctctagaacttactttatgaatctgggtgctcctgtattgtgtgcatatatatttaggatagttagctcttcttgttgcattgatccctttaccattatgtaatgcctttctttgtcttttttgatctttgttggtttaaagtctattttatcaaatactaagattgccacccctgctttatttttgctttcagtttgcttggtaaatattcctccatccctttattttgagcctatgtgtgtctttgcatgtgagatgggtctcctgaatacagcacactgataggtcttgactctttatccaatttgcctctccgtgtcttttaattggggcatttagcccatttacatttaaggttaatattgttatatgttaatttgatcctgtcatcatgatgatagctggttattttgcccattagttgatgcagtttcttcatagggtcaatggtctttacaatttgatatgtttttgcagtggctggtattggttttacctttccatatttagtgcttgcttcaggagctcttgtaaggcaggcctggtggtgacaaaatctctcagcatttgcttgtctgtaaaggattttatttctcttttgcttatgaagcttagtttggctggatatgaaattctgggttgaaaattcttttctttaagaatgttgaatattggcccccattctcttctggcttatagggtttctgcagagagatccactgttagtctgatgggcttctctttgtgggtaacccgacatttctctctggctacccttaatattttttccttcatttcaaccttggtaaatctgacaaacatgcgtctcgtggttcctcttctcaaggagtatctttgtggtgttctctatatttcctacatttgaatgttggcctgtcttggtgggttggggaagttctcctggatgatatcctgaagagcgttttccaacttggttccattctccctgtcacttccaggtacaccaatcaaacataggtttggtcttttcacatagtctcatatttcttggaggctttgtttgttccttttcattcttttttctctaatcttgtcttcacattttatttaagttgatcttcaaactctgatatcctttcttccatttgatcgatttggctgttgacacttgtgtatgcttcacaaagttcttgtgctgggtttttcagctccatccggtcatttatgttcttctctagactggttattctagttagcactcctctaatcttttttcaaggttcttagcttcctatcattgggttagaacatgctcctttagcttggaggagtttgttattacccaccttctgaagcctatttctgtcaattcatcaaactcattctccatccagttttgttcccttgctggtaaggagttgtgatccttgggaggagaagaggcattctggtttttggaattttcagcctttttgtgctggtttttcctcatctttgtggatttatctacctttggtctttgatgttggtgaccttcacatggagtttttgtgtgggcgtcctttttgttggtgttaatgctattcctttttgtttgttagttttccttctaacagtcaggcctctctgctgcaggtctgctggagtttgctggaggtccactccagaccctgtttgcctgggtatcaccagcagaggctgcagaacagcaaagactacagcctgttccttcctctggaagcttcgtcccagaggggcacccgccagatgccagctggagctctcctgtatgaggtgtctgtcaacccctgcttggtggtgtctcccagtcaggaggcatggaggccagggatccacttgaggaggcagtctgtcccttagcagagctcaagcactgtgctgggggatccactgttctcttcagagctggcaggcaggaacatttaagtctcctgaagctgcgcccacagctgccccttctcccaggtgctctgtcccagggagatgggagttttatctataagcccctgactggggctgctgcctttctttcagagatgccctgcccagagaggaggaatctagagaggcagtttggctacagcagctttgcagagctgcggtggaccctgcccagttcaaacttcctggtggctttgtttacactgtgaggggaaaaccgcctactcaagcctcagcaatggcggacgcccctcccccctccaagctcaagcatcccaggtcgacttcagactgctgtgctggcagtgagaatttcaaaccagtggtcttagcttgctgggctccatgggggtgggatctgccgagctagaccacttggctccctggcttcagccccctttccaggggagtgaacggttctgtctcgctggcattccaggcaccactggggtgtggaaaaaaactcctgcagctagctcggtgtctgcccaaacagccgcccagttttgtgcttgaaactcagggccctggtggtataggcacccaagggaatctcctggtctgtgggttgcgaagactgtgggaaaagcatagtatctgagccagaatgcaccatccctcacggcacaggtcctcacagcttcccttggctagggaagggagttctccaaccctttgcacttcccaggtgaggctacgtgccaccctgcttctaacccttcatgggccatgcccactgtctaaccagtcccaatgagataagccaggtacctcagatggaaatgcagaaatcacttcccttctgcattgatctcactgggagctgcagactggagctgttcctatttggccatcttgagaagtctgttaaggatagttttaaggtttattctgatgccacaggactcttcttagattcctcttttttgcttctttttggtgaactagctagggtattgtttagcttgttgttcttagtaccaggagcacccttatgcttgcacttctccacactctgttttagataaattcagtttctttggagagggcatcagtgctcttttcttatagtctgcctctccctcagcaaactctctaagccattattctgggtgctgggcagggcggtagcctctggtcttctttgtttgcccatcccagaatgaaatatctgatttatacatgatttgcggggcaagggtgattgggacctcagttttcttgggaaaagaaacttctttcctggggttgagtctctgtctatgaataagtgatggctataggaaagtagcctccagcctctcagatgtgcacaccaggatccagcctcttcaacttggagttggaggggatgagaaatgccggcagcctgctcctcctggtgagatagagtaggacttggttgggagctgaaaggagaggcagccccagtcttcttggccacactcaaccagagtgaatcttctatcagtatgagctggaagttggggggcagggagtgggtcatggcccaaatgccacaaactagctgtttttagccagtttcagtaaatttttcttgaaaacatattcttaatttgttttatgctcttagaacattttccaaatactctgggaagttggagtctgtggagcttctcgtgctgtcatcccagaagtagaacatccccaaactatcttctaaaggtttgttttggccaggtgcggtggctcacacctgtaatcctagcactttgggaggccaaggtgggaggattgcttaagcctaggagttcaagaccaagctgggcaacatggcaagaccctgtctctacaaaatataaaaaattatctgggtatcatggtgtacacctgtagtcccagctagttgggaggctgatgtgggaggattgcttgagcctgggaagttgaggctgtggtgagccatgatcgtgccactgtgctccagcctgggcaacagagggagaccttgtctcaaaaattaataaataactgtgttttgtcttttatatttagatttacagtttatctgtaatttatttctgtgtatggcatgagatataattcacatttttttcacttgtgtatctacttgctccaggaacatttaaaaatacactttccctactgctttgctatgccataattgttgaaaattaagtgtccatatatttgtggaaagtgaaacgtgacagaaaaataaagcaaaaaaggaatgcaaaatgctggagggggtgtggttaggagcttgctcagggacgaccttgccaagaaggtaacattccagcagagctgaaggagatgagggaagagcaagccatgtgaagccatctggaaagtgctttccaagcagggggtacaagcatgtgcaatgcttctgagatgggagggtgtgtgggctgctcaaagaacagcaaggaggccagagaaatagtatggggtcggagaacaagaaggagcagatcccagggccttgtaggaactctgggacaaggtgtactggaaggttttgagcagacaggtgccatgatcttactccttttggctgccagtgcacaggtgactgtcaggacaagagtggaagcagggagaccagtgcagaacctattgtaataactcaggcaaaagacaatctgattgtagcagtggaggtggtaaggagcagttagattcagcctacactttaaaggaaagccaacaggatttgtgaatggattggttgtagaatcacagaaggaaagtaaaaattcaaggatgtcaggtggtggccctcagtgaatctagcctctgctacaaatgcccttaggctgtccctccctcttgaatctgggctgaaccaggtgatttaatataagcaataaatgtggcaaaagtgatgctgggccattatggacctaaacctgtagaaggcctggtagtttctgcttttgtgctcctgggaagcttgacctgccgtgtctttttggcatgtggtgtggaaagatgctgtagagaggctctgagcctgcatggagtaagaaggacactcagccatccagcatcccagctcggcctatctcctagctcaccttccagctaaatgcagcacactagtgactagcagcaagagcagcagaaaaaccactgagttacgttaagctcaatttacagaattgtgggcaaataaaacagttgttgtttaagccattaaggcttggggtgatttgttattcagccatagaacatgaaacagatgacccccagagttttggcctgagtgcacagaaggatggagctaccatttaccaggtgggaaagactgctagttaacaggtttgggggaagaacctgggtggaaagattaaaatcttactacttgtacatggaaaagaacacatgtttttcttaatatattggaagatatcctctacctcttaagcattactggattttccaaggccaggaaagatcattttaggagtaactctttggatctccatcataatagcgacagtaaaggttaaaggaattgttttgaatttttttcttttaggcttctgacactctgttgacaaagaaatccccatggcaattcaaggcaaagaaactcccacccacaaagtttttctgcattgccacttgtggtttcagggcttcagtaactgcaccatgtaaaggagaaaccactggactcactttctctcccagctttccacaactggtcataatgaaccaccttgggcttggctgatggtcttctggaagctgagtgtgccgccttggagggaagcccttgccagttttagatttaatccttcctgtggccaaacactttagagacagaagcatgggggaaaaaaaaaagattgcctggtcaatttggtcagcctgtgagtttctgatcatagacatctggctaataccttgcggacttgaatgcaaattaagtgctggggaggggtggtgtgttccttaagaattcttaaggccccagaacaaatattaatgtgatattattaactttatgtttccaacctcccattcactccccctatagcccactacatttacctactcatacttccttcccctggttaatcggcttctgggaaaggtttagaatacaactaaatgaaaacaacttaatcatacacattaatcatatacacagggattcattgctgctgggctcagccttgtcttgggccagcgttcctgggagggggagtggcttccacctctgttccctctgaaggtcaccagccactgcaaccttaaggtgaacaggaagactgggttttgcgggcagaggggactcccagtgttgagcgtttataggatttatgtcagaacaatgctgatgtgccttaaacatttagttttaagaaaaattttggaagacattaagaaaaatttaccatgaaattatgttatgaacagccagacttgagagatgcccttttggaaatgggtgttgtgtgaggcccccatggcatgcacgtcgtgaaaatgtgttcgtgacacaggacactgttctggcctctgcaaatttcttaaagtcatgaaacgcctttagctaaagcttcttccaactaccgttaacaccattccaggtcatttccttgaaggcatccaccagtccttgatgaactgttgctcttcagcttctgtttacttcaccatatccttaaaagtgtttgtctgtctccagcagtctggtgcctgttaacactgacttagttgcgaacttcacaaacttttgtggcatatccagccttatcactcggagaatgtccctccgatgttacggatgaaaatggctgagcaggtgcacatgtcaggaggagagccccagtgaggggcataagcagactggtgagtccaccctcagtggagggcctaaaaaccctagtggccaagaatacatgtggagtggaatgtgtttcagtgtgaagtcctccagaagcaaccctgagataaggagttgactccaagtagttcatctgggagatgatttcagtaaacacaggtaggagagtcaagaaggaaccagaaaaggggagaaagccaacacaaggtgtactaagtcaactaccagagggggaaactgaagcttaattcctgtaggaactctctcaaaaactgcgaaacacatattcggtattatcgcacccaagtagcaaaggagctagccaatttatacaccaacttctagggagtgctgattccctggcacttgtggcctacagcacccagagacagaatagctttccatcgttctggaaaaagcctgtcaaagttgtgtgggggatactaaaacagtgaggttcaagagcaatgaccatggcctgctctaggatgccttccaggctggctttcattggctgagaccttaccacagtgcttgttgtatgcacctgcagcctgaaaatatggatatcagctattctgctcagcattgtcatagatttccccagaagtttaaggaacaaatatatgtactgggcatcattaggctgagccagcattgtatgggaaagcagtaaatgagggattgtgtaaacctataggtctggtcatctttttgtgatattattaaatgaaaactgcaggctatagaaccccattttgggagttcaatatagcaccattttttgtgttaaaaacacacagaaaattcatgcataaagagtctgtagggtgtttattaagggttgcctctagggaagtaggattatgagctaaatttttatttaaaatttacatttttaaaattttccttatctattttctaatttttttcctaataagcagactacctttgtaataaaaatggccaaatcaaaaaataaaagatcccacaattattaatacaatctcaagattcaagaatgatgctcttttctaaatcttctcttcttcattccctcccttccttcttccctccttccatccagtgtcaaaacagagtgacctcacttgtctgcaggtcactggtatgcaatattaccactctcaaatgtgggagaaaactggaaattatgcaaaaaaggcttttgagtagccccgagagatgtcctcatacccgtaaaccaaaattcattcactttgctcacagacaagcccctcagactagcatctaggacttatttatacatactttgtaaaaaaaattctaacatattgatatccaaattcaatttcacattaattttctgtctttccaacttctattttaggttcagggggtacgtgtgcaggtttgttacatgggtagaatgttgtgggggtttggtttacggataattgtatcacccagttaatcagcataggacccgataggtggtttttcaattcttaccttcctctcaccctccactctcaagtaggtcttggtatcgattgttcccttctttgtgtccgtgtgaactcagtgtttagctcccacttataattgagaacatgcattatttgattttctgcttaggataatggcctccagttccattcatgttgccagagaggacatgatttcattttttttttttttttttttttttttgagatggagtttcactctcgtcacctaggctggagtgcaatggcgtgatctcggctcactgcaacctccgcctccctggttcaagtgattctcttgcctcagcctcccaattagttgggattacaggcacccaccaccacgcccagcttaatttttgtattttttagtagagatggggtttcaccatgttggccaggccaactcctgacctcaggtgatccacccaccttggtctcccaaagtgctgggattacaggtgtgagccaatgtgcctggctgatttcattcttttttatggctgcatagtattccatggtgtatatgtaccacattttctttatctagttcactgctgatgggcatctaggttgattccatgtctttgctattgtgaatagtgctgcagtaaacatatgcatgcatgtgtctttacagtagaatgccttgtatttctttaggtatatacctagtaatgggattattgggttgaatggtagttccattttaagttctttgagaaatctccaggctgctttccacagtggctgacgtaatttacattgccaccagcagagtataattgttttcctttctccacatcaagttcacatttagacatggtaattagaaggtaagaaagggcctgccataggcagacatactgaaggcagagaaaacagtggcagagctgacaagacagtccaatcagcacaggcactccaggtgccttaagcaaaatcacatgctcttgtctcctcaccaagccctgaagatgcccctgtttccaaatccagagctaggtcacagtgaccaccttgaggaatccagaccaggcttaattctactcaagagaaccagatatccaacactcagaccttacaaagaaatcaaatataggcacacagttaaaagcatccatgttaaaagtgggcaccttaaaatacagcttcagattcttggtgatataagccagattagagaatgaggttattttctcatctgtttctactttttctactttagtgtgaaatgaagttgattttacatctctcagtattctctggttccagtagctgatctttaatatccgatctgataaggaaggaacttatattacctgttacatttttgcctccatgattctgaatatcactatgttccccctcttggcttcacaatattccttaaaaaaaaaatgtagaaaattgaagagtaaagtcttgacaaactgttcttggagacgctgtgctcttttatactggccagtttttgaactcttaataaaaggggtccttaacaagctcaaatgtttaaatataaatggaaaaagggcaaaaggagatgaaagaagtggcattcctggtgaaactggtcagacgattttcagactccaaagtgtcctgatagttttatgtgatccaatccagttcctgaaaaatctctgccaacaggtaacaggtcttcaaaagcttttgaagccaaaggctccccaccagccagcccatctctcactaagttctcagcctcattaagaatgagaaacagataccacggcaccaacctgtctatgagagcacagcaagacaaatgtaattgcctgtaccaggaatacaaatcagcaactctcaaattattcatatttacacccactatattttggttgtctttcctttataatttggccatacattgatgtcaagtgtataattttatctgggatttatcagttaccgcccagagccatgattacatggtgcagggcacttcctccccctgagcaagtctatctttagtatcttcttgataaccacttcttacataaaaaaaaaagaaaaaatcaaaaggaaaatcttggttttcttatgtggctccagaatccctgaatataacacttagaagtaatttatcaactgaaactatcgagcttttagctgccactacaatttttcaaagcaaagtgttcttattctttctctttgttatttttatcaaattgcaagagaaattttagggacttccatattgagcattcaatcatgtactaagttcaacttgcatcttgccagtgtcttctttaactgcgtaacactggccttggaacaatcagaacaacagcaagatggataatggtatgatttctgggagaacattttataaacaaaataaataatagctctctaaccaaggattcaaaagataatttattagtctgagaagaggagtcacatactatacccagtaatacgcttcttttatttttgtgcctttatcttaaaaatatatttaaacaaaaacaaagataatattgaattttcccataaactttgctttcttatttacagtgttatattgtaaataactttccattatacacaaattaaggactgtgcattactgtatgttctctttacatattctttcataatatagtccatacagctcgaagctatgcaatatttaagcttagaaaagcttgatgaaataagtacaaactgtatcaatcagactattatttaaaaaggttctgacattaattctctgctagattgtttcactgaaaccattctttgttaaagaaaaatgccccatataagggatgagaacaacagtttaagttaccacaggatccacttaaactggttaacaaataaaaacactttattacttattactgttattaaatggagcactaccactgtcaagtcatttaaacaagtagatttactcttcagttctgacatatcacatcagcgacagttggtacctctttacgaaataaaaaatgtttcctgcaactttaggttttacttgtaaacagttaaagcacacattttgtaaagatgatttaaccattcctggtcacacaatgaggagtttctatttcatccacggagaagcaaacacacatactccacacatacacatatgtgcgcacatacgcgcacacactcacacacagtcccgctcacccaccaaaggcccgcgtgtcactaagcgctaactacagcagcacttgtgtctcgagcagtgcacgaggttgcaataggaattataaaacaagaaagataaaacaaccaacttcagttaaaaacccccaaaagctcaggttctgaaatgcctctgagacgcttcacactcagcctgaagggtcagttcactgggctctccaggcggcacaccccaccttcgattgccacagactgtcctgccaccgcaccaggaggaagtcttgaaatgtgagtctgcagagagagagagacagcagagcatcagaggggtcagcggtgtcccttgccacacccctacccgtgtccaaaaaaggtggaggaaacaccagagcattaggccttcattttgcttctgagcatccacagactgtaccactggtaaactttagttactgaaagatcgtttgttcaaatcgctcaggaaatatttactgagcatctgctacatgccaagcacagcactagcaacttgagatacagaggtgaccaagttagccaagacccctgaccgcacagaatgtatagtttaattatattcacaagagtagcagttttaatgccagctctattgagtatagtcattatgtgaaaactagtaatttgtatatgttttgtcttctaaacagagtaactaaggatacttaattcatgtttatatcccaaatttattccttaaagaatttcagtagcttacaaaaactcagataattcaatagcctaaagtaggagaggaaatgagaagaaaaataagagcttacaaaataaggtaaagacggaagtggggccaacgaagaaatctaagctgaggagtttggtacccgtgccagaggcaagcctgctgccctgtctctcagtttcctagcagcagagatcaggtaggtggttcatgtagcataaagatcacagcaaacccactgcttggatgagaacaattgttcctggcactgagaccaaggagccatttctcctatagtctttgtaaagagggcactgtgtttagtgactgagtgaagacatcagctatacaacagggagttttgtagggctgagtgttacaacatcactcagaggaggctggggctggaggctccggtagaagacagtaagcacttcactctgtttcatgaggggtcaggatgaggtcagccaagaattcctctttttggtgatctggcttaatccaaggatagataaatgtctggaatttctaagaagaaagaggggctgcataaacttcacgcaatcctctctacttgttctctaaacgagcttttcctaagtactgaaacatggtgagtctcatcagaagacaagaaccttggtctgaaaaagtgtgagccaagatgtgtttgaagcttcctgtggagatctcaatggggcatcaaatcatataaacagtgggagccgtttaagaaaatgttttatatgagcttatctccagagttctttttgaaagaagtgagcttaggccgggcgtggtggctcacgcttgtaatcccagcactttgggaggccgaggcgggcagatcacgaggtcaggagatagagaccatcctggccaacatggtgaaaccctgtctctactaaaaatgcaaaaaaattagccaggcgtggtggcaggcgcctgtagtcccagctacttgggaggctgaggcaggagaatggcatgaacctgggaggtggagcttgaagtgagccgagatcacgccactgcactcgagcctgggcgacagagcgagactccgtctcaaaaaaaaaaaaaaaaagaaagaaagaagtgagcttaaatttctctttagcctaaaaacagaccactttctgcaacaaacttggatgtcagcataaaaaatgcaataaactgttttacactgagcaagtgtccaaggactgtgtagactctagagtatcctacaagcagaagaacttaacaaagtacctttacaatatttaaatagcaatgcatttttattggaatttggaactaatgggaaataacacattaaaatgatacatgaaaaagcagcagacatctattttgggtcatctccctccactccttgctacatgccctgctcatacatctctctgtgataccatgtctctggctttttctcaagggaagccttgaccaggcacccaactcaacttagaagttcttcttttagctcctatagcacccatatgagcatttctcatccagtcttggttttgaatctttaggtttctgtaattgaaagtcggttttgggcagaagctttgttacatacatctcagtttccctgtacctgaccatgtgtttcacacagaagcatactactccggaaatgctgagtgggtaaatgactgaaatagaccattctagggctatgtttatgtaaacatgcagaatcttaaggcaccctgctcctgccattcaagagacagccgcatcttctcatgcagtgctagccacatccctggtgaaggtgaaggccaaagtaaaaagatttggcagtatcgggcgctggtcaccagggctgcttttaactctggtaaagcagatgttctcaccatcagtgaccccttccttgacctcaactacatagtctacatgttcccatatgattccacccatggcaaatcccatggcaccatcaaggctgagaatgggaagcttgtcatcaatggaaatcccatcagcatctttcaggagtgagatcccaccaaaatcaaatggggccatgctggtgctgagtacattatggagcccaccagtatcttcacgaccatggagaaggctggagctcacttgcagcagggagccaaaagggtcatcatctctgctgcctctgctgaggcccccatgtttatataggcatgaaccatgagaagtatgacaacagtctcaagatcgtcagcaatgcctcctgtaccaccaactgcttagcacccctggccaaagccatctatgacaactttggtatcatggaaggattcatgaccacagtccacgctatcactgccacccagaagactgtggatggcccctccgggaaactgtggcatgagggctgtgtggctctccagaacatcatccctgcatctactggcactgccaaggctgtgggcaaggtcatccccgagctgaacaggaagctcaatggcatggccttccatgtccccattgccaatgtgtcagttatggacctgacctaccgtctggagaaacctgccaaatatgatgatatcaagaaggtggtgaagcaggtgtcagagggccccctcaagggcatcctggactacactgagcaccagattgtctcctccaacagtgatacccactcttccatcttccatgctggggctggcaatgccctcaacaaccaccttgtcaagctcatttcctggtgtgacaacgaatttggctacagcaatatggtggtggacctcatggcccacatggcctccaaggaataagacccctggaccaccagccccagcgacagcatgaaaggaagagagaggccctcagctgctgggagtccctgcccacactcagtcccctaccacactgagaatctcccctcctcacaatgtccatgcagacaccctgaagagggaggggcctagggagccccaccctgttgtataccatgaataaagtcccctgcgctcagccaaaaaaaaaaaggtgtgggggggaaaagaattttaagtgttttaactgatatgaccaatctgtttggctgaaaagtgaatcatactagtttgccatagtaaagattaatcttagatttttttggacgggcgtggtggctcacgcctgtaatcctagcactttgggaggctgaggcaggcggatcccccgaggtcaggagttcgagaccagcctggccaacagggcgaaaccccacctctactaaaaatacaaaaaaaattagctgggtgtggtggtgcatgcctgtaatcccagctactccggaggctgaggcaggagaatcgcttgaacccaggaggcagaggttgcagtgagccaacctctcactgcactccactgcactccagtgcagtgagccaacctcgtgccactgcactacagcactccctctcaaaaaaaaaaaaaaaaaaaaaggcctggtgcggtagctcacgcctgtaatcccagcactttgggaggccaaggcgggcggatcacgaggtcaggagtttgagaccatcctggctaacatggtgaaaccccgtctctactaaaaatacaaaaaaaattagccggacgtggtggcaggcacctgtagtcccagctattcgggaggctgaggctggagaatggtgtgaaccctggaggcggagcttgcagtaagccaagatcgcgccactgcattccagcctgggcgacagagcgagactctatctcaaaaaaaaaagaaactttgttttttttttaaagtatagactaactaaaattttccactttccagttgatggcactgttagaatagagatggagctttagattctcagatgcaaacagctccacaccaatgggatccactggccgtgtagttataatttgccgctttcttgctaattccctaagaagcacagacagattcttgaggttaacaccccttgaaaaactatcaacttataaattaaactgactgttcaaagccaatattagggctatatctttttataaaaccaaatacaatggattaacaaatttagctcgaagattttaaaataagaaaattaagagaaaagtaatatagaaagtatataattgcctgataacctaatcacaatctaagtagtagctaaaatttcctgtcattcatactcaatgttaagatcttccaagaccaccttagaaactgctcttgtatggtttctaggaaaactgcacacaacttaattttaaaagtcctcttccagagagagatcattggaggcatgagcaacttaaacagcagtcaaatgggggcccttgagtcttgtccatttgttgtatagtgctgcattaataacattctgacaaatccagcacaaggaggaacatgaaaaacactagggtaaagttgtttgcatgggcattttccttcctggaaagcaggactctagcctcctgagacaagtgtgttcagctcaattttatgttaccacgtgcttttgaagaaacagatatctgtttccaccactttcccttctcctgttaattcttacttatttttcaaattgctgagtcatagaaaacatctaatttttcatgcactaacaatgtcacatgaactttaatataatctggaatactgtgtatagtttatagaataaaaatccatttaacaacaagttaagcttctcttctgtatttatcactacttgggcaatgtaaatatggtatatggtactgtgagactgtattgtgaactgggtagtaccttacatccttgcattgtgaattcttgcctgacatgataatagtcaccctcagctttcttttttttttttttttcttttttcttgagacgcagtctcactctgtcacccaggctggagtgcagtggcgcgatctcagctcactgcaacctccacccaccaggttcaagagattctcctgcctcagtctcctgggtagctgggactataggcgcgtgccactacacctggctaattttttttttttttagtagagatggggtttcaccatgttagccaggatggtctcgatctcctgacctcatgatccgcctgccttggcctcccaaagtgctgattacaggcatgagccactgcgcccggccaccctcagctgtcttttagtgccacaaacgtgatacaccttaaatgactaagtccagagagaaaggcaagagaagggctggggaagtgtgtctggttggtttttattgccttgtttctattgtgggcttttacatttttttctctcttaatgagttgactcaggagacactgccacccacccctatccttttcccagaagttccctacccatcgctttttaagagctgtctttcaaaaagacacaatttgtgaataactatattctaagcattctttgtgtgcagcattaaaccttggaatgtagttaactgctctaaaaatagagtttggtcgtcagacttcatcctgaaagcagatgtactcaactagctgacagtttcacatgaaccttcttaatatagtctagaataatgtgtatattttatagaataaaaatccattaactatgggtgaaaagatctgggtgcccacttactaagcctgtgtgatattggacaacggaaaatgaagactgggttagatggtctctagagcatcctttcagagtttggacaatctctgatgctgacttcatttagcttgtgtatacattgttaatgaatcaaaaaaaagtatttacttctattttctcattgtcttaaattaaaagtattaaataggccagagcaatttgaagatacaattcccgagttcagccaaccaatcagaaatatcaacagaatgagaaaggaatgccatatgttatttatcttactgtgtgtcgctcatacctcattctccacgttgaaaacaaggatgccagatgaaacacaaagatgacattcgggtaaatttcattgttagcactgaaacagggatatatacagggcaaaaagttctattgttctcacatacaaatatcatgtctaaggagccttaaaataagattaaaatgctgtctgatgagaacagcatattcttccagcctacaggccactttggttcttactatcaccaggctcactgacaccacacttcagtcagaggcaacatcagacaagagttccctcctatttttaggttaaaagcccagtgaagatactcacataaacatggcaagccccacagtaactattatttcaccactcacatggagaattatcatgaatattccctcttgctacaggtgataaaagtgctccattatttaacaaatatttattctgcaagttattatgggggaacagaagaatgaaacatggatctcgctctaagtgcaattatgtctttgcaggatgcagaaactagttctttgtgaaatcttaacaataagtccctatatttgcataatgctttagtttccatagcacttttgcatcaatgagatccctcaaaataccatgtcagacagaaagatgtatactatacctatttttttcagatgaaaaaaaaaatgagacagaatgataatgtggtttgcttatggtcagagaggaagtggaaaaattgagatgtgaatgaaagcctctgaactccaaatttagggctatcttgactccccctgaagacttaccatgaaggaggattctaaatctggctctgttaagagacatgcctttaactgcaggaggttttcagggtgaatcagagcttgctcaggaaagctactggaacaaatcttaccaacaaatttcaagatgattctgggactcagagaaatcggtttgagcctcaactctgctgttgatagattggatagtttctggatcgggaaatcactggctctctgggtttcaatgtctttttcggtaaaagtgaaaaacttcaactcaattatattcagagttctttctgattttgacattctacggagttttactactgagggtttcccttcaggtctgtaaggggaggctatgggtcaccatttccttggtcaagacagcccaagggaactgtcttttcctcttcatagggaacctggcctcaacatcctgatgatttgtactaggtgaaacccaaaatgtcatttatggtcttctggttggtaagctgccagataacatgaatcttactatagtttgaaaagagcatcttctatttgaaaagaaatgaaaggctaacacttaaactatcattaagaatgaggctactctccatttgtgtaatggacaatttcctgagaatctcagttaatctgtcagtgaggaattttggaggggaaaaatacaaaccaccaacaactgatttgaagaaagttctctttgtcaaaatcttgtgcttcctgacttactgatccgacccatgcccccaaagaactgttaaggcacggagacccagaaagcagcatttctcaagctgacttctgctgggtcctggcaggtgctctctctttaaaaaaaaaaaagcggggggcagtgcgggagcatgggcaaaagctgcaagtgtattgctccaccttgttctacccttcttagagccagacaggcacatgagcacagaaaggttcagacatcctgcattcaaaagacctgtgtgactctgtcaaagttagttcatcccaaatgtcaaggaatgccttcctttaatactagctgtacctggaactactacaaaaaatatgctgaaactttccttttattttactccaaaacgtaacctcactttcctttgctgattcttcctcatctccccagcaactaaatgttggaatgtccaaagactcaacagttagactacttttcttccactcattttaaagaaaaatgtctatgaagtgttttggatataaagtgaagcagctggttgcactggaaattgaggtaagaataataactccatagatcaacctcctcctccagtcgccactccatttctttacttccatttacagcaaagttatttgaaagagttctctacacctattacctcaaattctttccttccattttctctttaagccctctataatcagctttttgctttcacctctccaccaaaacccctctttatcaaaataagaaatgacttccaatgccaaatccaatagcctgtcctcaaatctaatttcacaaggcccagcagcagcatctgataaagttgatcacctgcttctccttgaaacacccttttcccttgttttttaggacaccactctcacctggttctcctctgacctctatgattataacttttcagtctccctggttgcttccccaacttataagtacaaaatttccccaggaatcttttctcctgtctgtgttcacctccttggtgatctcatccaaatgttttttaaaaaaatgtttatatgctgagattccctaatatgtatctccatcttagtcctttctcctaaactccagacacacatatccagctaccttttgggcctccccatttgatgcctaacaggcatcttgaaattaacatgtccagaactgagtttctgctacttcccctcaagtcttttcccccaacttcaccttcttcctcaccctagtaaatggcaattctattcttctgtttaggccaaaatcttaagagtcatcattgccttttctatttccctcatatctctatccaacccaacagcaaatcccattggctctatcttaaaatacacacagaagccaactacttctcaccacctgtgtggataatgctctagtccaagtcattattatcactcacctctatggcaacaaccttccacccggcctccctttcagcagctggagtcacctcttaagatgtaagtcagttcatatcattccactgctcattactccccagtggctcccatttcaggggaaaagcccaaatactgaccatggataaaaaactatgtaatctatctgaccttccattgcctactctgacccactaagaccggccttctcactgtccctccaacacaccaggcacactcctacttgagagtgtttgcacctgctattccctatgcctggaatgttcttgccttgctcccataaatcctccaagactttactcgaatgacacctttgaagtgaaacctacctaacgctggaatccctgtacctcctaaccccttccctagcttcacatctctttttagcacttatcacaaacatagtataggccttacttatcttgttcgttatttcccccaccagtatgtaagtcctcaagtacagggattcttgtcgcttggttcactatgatgtccccagaaaagtacctcaatatagaaggcactcaatggtatttaataaataattcattcaaaaaatgagatactgtgttttatcaaacttttactcctaagtaaactgaggttttttaatagctgaaatctcaagccaagtaataaggcttccgtcttagtcagtcattattagctactgtaataaccctaactcttaactgttcaaaattttaccatgatattcacaaaagccatcaatggaagaaatcaaagaattattggggttctaatctgttttaggaagcacatttaaaataacattaattttctatttcaaatgaagaaagatctatttccaagtactctgagcatctcctactagtgaattgttaatataaccctcatcctaaattaagtttcattttatcgcttcaacattgcagcagacagtgcagtccaaacatgtacagtacagtgatgacagctcaagagcataaaagcaaactgtcagtacctaccacttactgcatccagaagtatttgaaagaaatgtaaatagagagaacagcgcaaccatagccaaatgtctcaattagtgaatactaaaatgttaagttttcacaaattttcagtattgctttacttacagaacataaaagtcatacattgtaactatcacaaacaaattctaatccttaggattaaacagaacaagcactccaagatgaagacttttaaaaaaacataaactatattatttggatgaatcatactggaataaaaatgtattctaacagatagacttgattagggttcaaaatctacaacacgggttagtctcaaatgcctgtgaagcaggtcaggtgtaggactgtggaagtgaagcgcccaggcttcaccaaacagggcggctaccacctggctctaaccaatcactgccacataggaagtgggtcccagtgttgccaaatcatctgctcttataggagaaaacaatccagaacttaaaaatcatattttaacataaaattttaaatgtttaaatctgtgtaaaatttttccatataatttgtattttatatatatttaatttttttcaaagctgctatgatgaatacagcttttgatcttaaatctggagattactgggaagaaaggacagtgggaacaaaatgttatatctacgcaccatcctaactcaaagttctaccctaaagctcaacatgcagtcactcattaaagagctgtccaccaaatgcctactatgtgttgggccctgtgttgtcattagtacctgcacatataagatatacctagtagattccacatctgtaactcacccatttaataaaataatgtaataaaagttgttacatcataaaatcaatgggggattctcaatatttataatcatagaaaccaatatcttttctcaagttagtaagttaacatgaaataacaatgacatgaccaagattatagtttttgtcttgagactgaaaaaacaagagaaaattcctttcatcatttggctactgcttcccaaccaaaaaacaaaaacaccatagataatcattactcatttcctgttcataataaagtcaatcatttttaagtacatttgtctcatttacatgtcatggttatatgtcctgtgagcaaacagcaggcatgagtctggctgggaagatacatatttatctaaaatgttgggtactagaaggtaacaaggtgatattctaagttaggttcacatctgtgactgataactacatacgtatgtggagatagagaaattaatgttttcattacttttcatgttgctaaaataaagaagttcatccacttcatttctactaacatggagggtctacaagtcaagtaatagattaaaatagacatttatctttgcaaagatcttaccctacaccatgattaaaatgagaataatttgaatacatattattcgcacctctgggaagacttatactcttaacaacacagtaaattccctctttgtttttctatttattgctttggagcaatgttgaatgaatcatttggaagaaattaatgatgtaagactaattaggcaaaaataaaattaccaacgactgttagaaattaacttgaggctgaggaaactgtttttcatacattcaatcttctgcagtcttttcctgtttgtgcaaatgactttctaaatagacccaatgggatcatcctggcagccctaagagcatgaaaaagaaacacaagtttctacatttcaaattctgggcaaacttaaaaggtacaagtaaaatcagtgattagccacttttcctgtggtttataagtgcacttgccaaacttggctgtctcggatgttttcttagtatataggtttattggtggcgcctcaactaccatcccgaggcagttggcttcccgccagggatcagatgcctttagttgttggataatataagaactagattatcaaaagcagttaaaatttggttaagactaaggccaatttgtatctaggtgtttcctgtcaaatctaaaatatggtccaataaatctatttagctggatacatccattcaatgactaaatgccattggccactattgtgaaatggaagtctcttttaagggattcatggtcaatacatcctgtaggtgttccactgcccagtgctcagtggaatacaagaagattgcctgtaatcaaggttcacacaagagaaatttaacacagctagtaaggaatattctcccttcttctttcaaaaggaaaattacctggatgggtgagcttaaaagaaatgctgaaggcacaccttaggtttgatttaaaaacctaagttgtggcgctgtcaaagtggtagacctctatcagatagtttttagaaagagctcctttgccaccattttggcttgaattgcagggttcagggaggagtgtcttttcttgtagcttccaacaatttttttttcctgttctgggaactctgaattcacttaccagctggcttattaacttattaacattaacttattaacttattaacattaacttgcaagttagagttgcattttgtcaaaatgtaataaccattaccatttccaccaaaggagcacggtgaaaattcaggtggcatcactcttgtcatagtcaatataaatgccacctttgggagcataactgcagtgtaaatggggcctgtggagctgtggtgtgatggtcctgagaaattccctgcaacttccaccatcacctccttcctccaccactactgctgccaccaccacccatcataacaaatgcagcatctattacatgcacttcatttttattattcaactaattttcagaattctatcaaagcatcaatagatgaggaaactaaggatcaaagttgtaacttgccccggcttataaagcagggactccaggattgaaatccaagtctgactaattctaaagcccatgctgtcaatcattacatgcctctttaaagacaatcttacctggggaacatagcaagaccctgtcttgacaagaaataaaataaaaattagccaggtgaggtgtgcccctgcagtcctagttactagggaggctgaggctggaggatctcttgaacccaggaatttgaggttacagtgagccataatcgggtcactgcactccagcctggatgacagagcaagagcctatctcgtaaaaaacaaaaacaaaaacccagatagtctagctaatatcatttttaagactttcaaaaaacagaggtatgattttacacacaataaagtgcatagatgttcagtaaagggtttgatgatttttaatgatttgtatccccatgaaaccaaatcctaaggagaatattttccacacaggacatttctattactgcccccaaattccctcatgcccttttcctgaagcaatcactttctgatttctatcaccatagcttagttgggccagttattaaacttcatataaatagaataattcacttagtactctttcatgtctggctttgttcactcaacataactttgtgaacaaagttaaagttatgtaggaaaattatttagctttgtgagggtttacccttggcccaagaagatcttattaaagttttataaaaaggccaggtgtgcagtggctcacacttgtaatctcagtgctttgggaggccgaggcgggagtattgcttgaggccaacagtttgagattacgccagcctgggcaacatagcaagacctcatctctacaaaacatttaaaaattagccaggcctggtggtgtacctatagtcttagctacttggggagctgatgcaagaggatcgtttgagcccaggaatttgaggttacagtgagctatgattgtgccactgcactccaagtgggtgatacagtgagatcctgtctctaaagtaagtaagtaaataaataaattgcattatttaggtaaataggatgattttatgaggttttcagacattaaagctgacaaaagttaatagtcatcacatcaagatttacatacataatcacattcaaaatgattaagaataaaagaaaaatatctcaaataaattgcaatttctagtcaaacacctatttctatatcaattttgatttcttaatttatctttcatttacatttttttctgaatctctgttcagaaataatcctttgttacacataaaaaatatttttagcacaaataatcctttgtgttattgccctagtcttaataccacaaagccacctgttttaccttggttatatttttatctttaagagccagatacacttatttagtcagttataccccaataaccttgtgaataaaaaatttgagaattaaaaacaaataagggtgttcttatttcaccaatcctcacctaattttagaaaaatcacttccctaaagcagcaacttcgcctgaaaaattctttatatccctaaacagactgaaagaaaagtgagattatgagaaacctatgacagtttactagatattgtgtgcttttagtagtttaacactggtaatacttgaaggccaagagtaaataggataacattttaaaatgtatacttaattaaagtttaaagtacgtaagcagttaggtaagcttgtgaagaagctgaccaaaatacatacatcaggagatacaagtgtccatttaaatttcctctttcatttttttaaaagaatattttattaaggttgttgaatgtataatttctcattttagaaatctttcttgtaaagacaattctttcatctgacgacaaacagcatccacactgctggtgattattctggccctccacattgaataaaatttggtttatttaatttaattaattaagttatttttgagatggagtctccctctgttgcccaggctggggtgcagtggcgtgatctcggctcactgcaacctccgcctcctgggttcaagtgattctcctgcctcagcctcccgagcagctgggactacaggtgtgtgccaccatgcccagctaattttttttttttttttgtatttttagtagagacgggattccaccatgttagccaggatagtcttgatctcctgaccttgtgatctgcccgcctcagcctccgaaagtgctgagattacaggcatgagccaccatgcccagccagtttcctcctgagacacaaatttccgtctataattctgagacaatatttaataatttctgcagtgtctggtggaccctgctgcatcaaccaatctggcaattcccttccctcagaatgctgtgaaactgcagagctggacggtattcctgctgattccaaagctgattcattgatttttagggttgcctcttctgtggaggaacactgccttgattatagtagcttaacagtaggtcttaaagtctggtactgtaagtcctctaactctgatcttttttaaagttgatttttgcagttctaggtcctttaaattcccacacaaattataaaaccaacttgtcaatttcttatttaaaaatgtctgctggaatttttattgagattgctttgaatctatagctgaatgtggaaagaatggctatcttactgtgttttccaatccatgaatatggcatgtttctctatttagattgtcttttatttctctcagcaaggttttatagttttcagggaacacgtcttgcacatcattcgttagattcatttcatgtcctctgagaataactatggcttttactatttcttttccaagttttatcttttatttgctttattgtactagtggagcatccaataaaatactgaatagaagtgatgagtggatgccctctttgtctgttgtcagtgttagaaagaaagtgttcagtgtttcaccaattagtatgattttagctgtaggtttttgatagatgacgcccttaatcacattgaggaattttccttggatatctcatattttgagggttttttcttttttttttttttttttgagacagtctcactctgtcacccaggctggagtgcagtggtgtgatctctgctcactacaagctctgcctcccaggttcacgccattctcctgcctcagcctcccgagtagctgggactacaggcgcccgccaccatgcctggctaattttttgtatttttagtagagacagggtttcactatgttagccaggatggtctcgagctcctgacctggtgatctgcccgccttggcctcccaaagtgctgggattacaggcattagccaccgtgcccggctattttgaggtttttatcattcatgcaagttgagatgatcatatggaatcaagaggaacatatgggttttctcctttattttggtaacagagtaaattatatcaattaacatttttaacagctttactgagatataattcatatatcagaaaattcatccacttaaataacttttcaattcagtagtttttaatatatttgcaaaatgtgcaatgttctaattccagaaaattttcgtcaccactaaaagaaaccctgtgcccattagcactcactccccattcccttacctctaccactaatctaccttatctctatggattttcctattctggacatttcatataaacaaaatcatacactatgtggccattagtgtctggcttcttttacctagaataatgttttcaaggttcatccaagctacagtatatatctgcacttcattcctttttacagctgaaaatattccattgtatgaatatttcacattttgctgatccattcatcagttgatgggcatttggattgtttcttctttttttgctgttatgaataatgctgctataagtatctatgcacaagttttcatgtggacctatcttttcattttcttgggcatatacctagaaatggaattgctgggtcacatggtaactctatgtttaactttttgaggaactgccaaactgttgtccaaagtagcagcaccatttttacattcctatcagtgatatatgagggttccaatttctccacatcctcaccaagacttgttaatattcacaatttttatcatagccatcttgttggatgtgaagtggtatctacttgtggttgtcatctgcatttcactaatgactactgatgttgagcatcttttcctgtacttactggctatttgtatatcgtctttagaaaaatgtctactcagatctcatgcccattttatgccttcttattgttcagttgtaagagttctatatatgttctggtacaagctcctcaccaattacatgatttgcaaatattttttcctattttgtgggctttttttactttcttgatgttatcctttgaagcataaaagttttaaatttttatgatgacctatttattttttcttttgttgcctgtgcttttggaatcatatctaagaaataactgcataatccaaggacagaaagatttactcctaagtcctcctaagaaattcatagttttagctcttaatattttggttcctgataaattttgagttagtttttatatatgggataaagggtccaacttcattattttacatgtggatatccttatgttccaggatcatttgttggcaatgactgacttttgaaatgttaagtcaactgtgcattccttggaaaaaccttatttggtgtccacgggcaataatactgctggatttttcattccaaagtaataacttattaagcatctccgcatatatattcatgacagctattggtctgtagttttccttccttgtaacatctttgtcaaatactgaggttacccttgtctcataaaatgggttggaaaacaatccctctgctttgtttttctgaaagaaatggcataagattaatgttatttcttcctgaaatgtctgatataaaatgccagtgatgccatctgggcataaagtttactttatgagaatgttttgcttatagaaattcaatttcttaaatatgtaaatggttatttaaaattttttgtgtttagtttgttaagttggttttcttcaacaaattaataaatttcatccagttgctgcctctgttgaaataaagttagccacttaatgcctacagaatcggtgaatgcattactatttccttttcattcttgctattggtaatttgtgggtttctttctttctttcctaatcattctttctaaagttttatcaatttcactaattttttttcaaagaacttcgtctagctttgtttttctccattttaaaatttcttttctatgttactgcttgcattcttattttgattattttctatctattcttcttaaagcttcttaagatgatagcttaactcatttattttaaactttcttttctaccataagtatttaaggacatacttttccttttaatgttttaattgcatcctataaattctgatatattgttttaattatcattcagttgaaaataattgtcagcttctcttggtaaatactccttatgaacttgaaaataataacttgttgaatgtaatgttctataaataccactttggtcaagttgggtctattattcatatccttactaatttttattcaagtcatttactattgtatgtcttatttcatactgagagaaagaaggatgttaaagtttccaactatgactacagatttgtctattactccttttattactgtcaatttttgtttcttttactaggcacatatacatttagacgttttatacctttttaattgaatggaccacattttcaatatgaaatgtcctgttttatctcatatctcctatgtctgacactaatatagccataccagctttcatttttgaaaattattttatttctaatttttatctcatttaactttttctattatttttcatccttcctgggtttgaaattatcttttaaatgatgtgaatatactcaatatcagttattttatgtttttatttttttcaactgacatactaatcattttattgacacataatattttacatatgtatgggatacatgtgatactttgtttcatgcacagaatgtgttatgatcaagtcagggtatttggggtatccatcaccttgagtatttatcatttctatacatattgggaaaatttcaagttctatcttctagctactggaaatatataatacattgtggttaactatagtcaacttactctatcaaaaattagaactcatactttctatctaactgtacccattgaccgacctctcttcattccctcctcccactcacacacctttccaagtctctggtatttatcactgtactctctatctccatgagatcagcatgtttgagctctcacacgtaagtgagaacatgctaaagttgtctttctgtgcctgccttacttcacttaacataatgacctccacttcaatccatgctgttgcaaatgacatgatttcattctttaatatgcccaatagtattccattgtgtatacagactacattttcttgatccattcatctgttcatatatttttaggttgattctatatacttgctattgtgagtagtgctgcaatgaacatgcaagtacagcacaggtatccctttgatgtactgacgtccttttctttggataaatacccagtagtagaaaggttggattgcatggtagtcctattttcagttttttgagaaatctccatattgtttcccatagtggctgtatgaatttacatttctaccaacagtgtatgagtttcgttttttctgcatcctcaccaggacctgctatattttgtctttttaataactgctattccaagtggggtaagataatatctcactgtgtttatgatttgcatttccctgatgattactgacgttgagcattttgtcacatgtctgttggccatttgtatgtcttcttttgagaggtatctactcatgtcttttggctactttttaatgggatctttttttttaaacattgagttgtttgagttcttgtatattctgattattagtcctctgtcagaagaaaagtttgcaaatattttctcccattcaactggttgtctgctcattctgtcaattgtttccattcctgtgaagcagctctttagtttaataagagtcctatttgtctcttttgggattttttgtctgtgcttttgaggtcctggccacaaaaatctttgcctaaaccaatgtcctgaagtattttccctatgttttcttctagtagttttatagtttggggccttacatttaagattttaatcaatcttgaatggatttttatatatgaagagagtcaggcattcagtttcattcttctgcatatgaatatctaattttcccagcagcatttattgaagagggcgtcccttccccaatgtacgttcttagagcctttgtgaaaaatcagttggctataaaggtatggatttctggattctctactctgttctattggtctatatgcctgtttttatcataatgttttggttactataggtttgcaaggtattctgaagtcaagtagtgtgaagtattcagctttgttctttttgccaaggattgcgttggctatttgggctcttttggggttccatataaatgttaggattgtcttttctattactgtggaaaatatcattggtatttggtcaataggattgttttaaagatactaattcttctgatccatgagcatgggatgtctttccatttgtctgtgtcctcttcaattacttttatcagtgttttgtagccttcctagtacaggtctttcatctccttggttaaatttattactaggtatttctttttagctattgtaaatggtgttgccttcttgatttctttctccaggcagttcatcattggtgtataaaaatgctactaatttttacgtgttgattttgtatcctggatcaggaatttcccttaagcaaggtttgggatctgagcccaggtgaaactctagagaattctccattcttatagtccaggcaccagcattctaaccacgggagacttctctttgtttataggcaagccgtcagctttccatgttgctaaggtgttcgttttgctctttgtaacctcctccagatttctgtgtcatggaatatttcttcactctcttaccctggcactaggcttctgtacaacactgcctggcccttgatgaaggccctgtacatgttgggagcaggagaggttttttaaaatctcttttgctttaatccagccttctgttgcaactgtgttgcacttgataaaggaccactatgcttccgagttgtcttgcggctctcttgctatgcctctagtctttctctggccactgccatgtatttggtgaaaatcttatgcaccttaatgaatcactcacaattctttgctctgctccaagctttggtgtgttgccacttgatgaaggcctcacagagaaaaactggcggtgggtataagctctctgtgaatggagtgtctcaggattttaatctgtcacaccagctcacacacggccataaagatttcattaaaaatttggctgatttgtctttatatacctctgtgttgagtttgactcctcctcctgctgctctgccagggaataaagcaatcagaggtttttgtctcctaggaagggcttgtctctttctggaatttagtttacttaggtttttctctacctaataacttctctggatactttttaaaaatttatgattctatagattatgcagctcattcacatagttgggagtagaagcaacagtctcttgtaactttcttcattctaattagaagtggagtttctttgcacttcttttgataacccccccttgtgtacatcatgttttatacttaagtctccctcctatggctttatgtgagaggtaagttttaagcctaggaaaaagcactcagaaatctcatctctgctatcctttgtaaatatacattcactaagttttttttaaagacctggaaaccatcttcatgaagataaaacatgttagaacacagtaggtactatattggtattacaaaaatcctactgaaaattaagtggcaacatatttgtttatgtaatctggaatgttgaatttggaattctgcagattggaagcaacaacaaggacttaatggggtctagtcatctgtattgagacagataaggttttgcttcctcgttcttatcatatcatatcacaggaaaggcttaaggcaaggtaaggatttcttattctcatattacagatgaggcctctgggatccagaggcagagtgatcaaaccacagctcacagtgtgcatggagtgggagggcaacccaggctccaacttcctggcactgcacccatcccaatacttatttattttaactgcatggcccaaagaactagtcagatgtgccaagaacagaaatcctggcacgacctcatgaggtttcgaagacttcatggcattaaaatagaaaatgttaaaaacaaaatgtaaatatcattgagttaccacccagtgccctgtgctttccctaggtgagggaaatatggtatgggcaacatctgtcctgtttcattaccatgtgtcagagtatgacacagggtttgtcacacaaggcagagaaacatcacaaataaatatttgttgagtaaatttttttttttaagaaaagctgagtaatataacaaaaaacatcccaagaggacagcaccttgattatgaaaaagcttagtctctcttagatcccactggaaaacaaggaactatcatagaaatattttgcaaaatatttgtaatgggatgtgttatctgaattttggtcattctagtcaggaattcaaaatgagaaaaaggcaatagtttgggggaatgtaatcattcatccaatgcagacttggttataaaccaagggtgatattttttgaactgcatcatttcaagtacaagacccaaagaactaatcaaatgtgccacaagacccaagagtgacatttaaaaaatttttaatttgaaaataatttaagaattacacaatcgttccgggaagatctatacatcctttaccaaggttcacctactgttaacattttgctccatttgctttgcaatttgctgttgctctatccatccattcatccacataatatatttttctgacccactgagaaaatattgtccatattatggccctttacccctagatgcattagtgtgtatttcataagaataaaaatattatacaccacagtacagtaatcaacttcagtaagtttaaccatgataaaacactttttactaaccatattccaattttgtaaattgacctaataatgcatttatagcatttttctgatataggatctagtctaggaccagttactgcatttagttgtcacatctctttagaattatttcctctggaacatttctgcagcctgtcttttatgacattgacattattgaagaacacgtttctttctttctttcttcacagaatgttcctcattttaaatgtgtctgatgtttcttcacagttaggttcaggttatacatttccagatggaatactacacaagtgatactgtatcctcaagttatcatagccagaggcacatattgtccatctgcccctcattggtggtattaattctgatcacatggtcaaggtgttgcctggtttctccattatatagttattatttttccctgcaactaataagaagtctgtggagagacacttaaagactataaaatagtctgctcctcctcaaggaaatttttataacagtattttcactgtggttataaaaagtgacctctacataataaaagaaacctaatttcatgtattatagctgaataagttccatgccagttttaacacctgtttctattacagtagtccatgcacactgggtgtttattaaaaactcttcattaactgtctgctatctgggtaggatacggacaatctgtttttaaaatccaactggtactgatgccctaattttggctccttaaaaataaatctttatcttatgttatcaaagcagtttagaaattaaattaaatgatttaattgcaagaacattctttaaaaaaaaaagacttgtaaaagaacctacctctatttattcaaattatacatgcattctggttacaatgatactgattattatccagccttttctacgcaatatgatttttagctaagctttaattcaaggctttaacttgggattaaacacaactagctcatatatgttcaaatggccaggtggcctcagtttctgagtttggtaacaagcagaaggaagacaatttttgaaaacaagggcacaagtgttttaacttttaaaaatagtttttaaattttaaatattttaagatgccttcttactcatttcgctaccacggctctcaacattatggaggaacatgtttcggaaaccagtcatgatgctgaacaggtatgccactagttagttcaactattcttttatagaagtcaggaaaccagagggagaggaaggtccaaagcttaaacagaatacaaacattgttatagccccttttctcttttgagctcagcctctcatctataactttgtcttacttgcaatacaaaaaaattctagcatttataacaaaagagataatttttctttttgatcaataaaattccgcagccaaatcattagtgtttttgttttggggttttctttttttttttttttttccttgaaagtatttgtagtcacaggctcaaaggagaaaggaaggaagagggattaactctcctcaaggaaggtcaaaaacataatttacaagagaggcaagaggaccagctgtatctgctggcccaattgactaccagctggagaatttaccagcaataagaaaaccatgtctaccagatgtcaagcaatataactggaggccaaatatcttcgggctcatagcaggactctacactctttcctacctatatttcacattaaatagtaaggtgtctttcacgggccaccagcaaggataacaaaaaatttccacacaagggacttaataacataatcataccccatcagactggcttcagtgctgacgtccacctcaaacatgctcttttgttaaaaagcaatcttagttctgaatcaatattaaggggacagagaaactgaaatggcttcaagctactgttaggcaaggattcttggggtttatcaggcttgttttatgtatgggaactgttttgtcactgagaagaaatgaatctgaaaatatgaataatcattttcatacttattcattaaacctgtgctgttcaatatggtagccacgagccacatgtggctatttaaatttaaattaagtaaaatttaaaattcagctcctccatcaaactagccacatttaagtgctcaataaccacatgtggctagtagcttccctgttggaaaacagagatataaaatgtttacatcacacaaaattctattagacagtgctgttctaaacccttaaatcacctttaaaatggacaattatatttccattctatataaattatgaaataaagcaatattttatgtattctcttaggaaacaggtctactaacacaataggaatattgtaccagatgaaggtgaagcaaagggggagggtggatctcagcaaaattttcacaatataagtcaatccttgtctgaataaatgttctttacactactcacaaaagttctgtggagctacaggctggctggataatatacaaaggatagtcaggataggtattacatgacaaataagcaataaagtgttctttattatatttatcctttatgattcaatctgtaacagactgctcatatcagaagttttcctattttatatgtcaaaatgtgcaaaataaatcatttcttttaaaaacaatgctgcacaacttcacagctttataactgaggtactttaatgccaagtaaacatcacaggccacagctgtttctaaaaaatttatgaacaagaagaacatgaggccaatataaaataaaatccacaaatcatgttgcttattcccaggctcaaccatcatgagtccagggaagcaaagcaactccggagatagtatgtggatgcctatgtgattattgcaactcactgagcgacgagtgccacaggcatgtgggacatggacagagacctttaattctgcccatgaagacaccaggtcagggcatgacagaacacactgaaaggtgagacaggtcatatttgcaagcatgtcagccacctgtgccatcaaacatgcaggatgctttctagggttaaagcttgtttgactcagtttcctttattccaacacttcttgcagaaacatccatctatgtcagctcatcagcttcactcccattttctcttcccaaaccccagtttcctcttctctacttattcacaatgggcaaaaaggaacaagctgggggctgtgggggaaagtgggcaggctcctcctaatgctcccctgctgtgtcaccaaaagcaaaatagatatgctggttttctctggagctgttagcattgttaactgttcttattcggatgcttatgaagaccacaaagctactgcccaaaaaaagctgaaaaaattcatccacatcaacttagctggttagaggtttatgcgatggctacaaggttttcaggttatgaccgttttttcccacttaccttggctttcccatcctgggctgacatatatccgacacacatgctctccgtcgtgtggctccacagaaattccactgccataaaagagaacacaaataggcacattcagatcacagatggaaaataaatctttgctttttaatagaacagttaaagatagctttatatttaacacactcagttccccactttccatttgcttgttcataaatgtcaagatgatttatcactaaaactgtgtaatgccatttactgtgaaatgaaaaatgtatctctttcctgtcaaaagttatgattattacatgtaaaataaatgctcttctgtttgactcttgtaacattaaatgcacacacacacactcgtacatacggtacacagtgattttgtaaatgtaatattccatagtgtgttttattttaaaacacgtgcatgcacacacacacacatacacacacaccaggtcttaatttctttccttattgagacggagtttcactcttgttgtccaggcttgagtgcaatggcgcaatcccagctcattgcagactctgcctcgcaggttcaagtgattttcctgcctcagcctcctgagtagctgggatgacaggcatgcaccactacacccagctaattttgtatttttagtagagacggggtttcaccatgttggccaggctggtctcgaactcctgacctcaggtgatccacccgccttggcctcccaaagtgctgagattacaggtgtgagccaccgcacccagcccttaatttctaaataccattctctacgaaaaagaaccaggattctttggagaaatgtccattccagagctgggacagagaaaatataaaatgaatctggaacatcttgttgtaccagaaaagtaaggaaatgctcaaagagtaaaggggacttatccaaaagacccaggggtcaacttgaagggctcttactggcaaaaatctgtgcctatgaaaataaataatgagagtaatgagttataaccactgaacaaagtcagaaccagtgagcccatactgatccaaacaaataaatggggaagaagacaaagctcttccttcagcagaatgccaactaataagtatagaaaaaataacagagttagaaaataatggttgctaaaactagtaggtggaaatttgaagaaggatgggctatttacatagcttcaaagtatctctccaaaaaattcttataacaggaaaaactgtttgttcactgtggaaacacttgatggactccaacttaactccatgaacaaagctaacaccaccaattaaggcacaaatcagtaccatgtgccttttgataagataccttgagacacaacacttctgtggtatttggtattcctgacaaaaatgcataaccagaattgaatgaggaaacatcaaacagacttgaaatagcaacactctactaaataactggtttgaactcttcaaaaatgccaaagtcagaaaacacaaagttgagaaacttcctgtttaaagaatacatgacaactgaacacaatgtgtcattctggattgtaccctggacttggtggtggggagagatgttataaaggacattatggaaacaattgataaagttggaaaagggactctgggttagacagtagtgttgtatcaatactaaaagccatgactttgataactgtactgtgattatttagtagaatggccttgttcttaagaaatactcaccaaagtattaggaataaaggagcctgatgtctccaattcactctcaaatagttcagggaaaaaaatgcacttatttgtttgtgtgtatgtgtgtgtgcatgtgcatgctcgtgtgcatgtagagggaggagggcatgaggatgggaaagcaaatggaaggaaaggaaaacactggttgaatctgggaaaaggaatcatggttgtcccttgcactattcttgcaacttttctgtatgtataaaattatatctaaataaaaagttacaaaaagaaaactgcaaacatccagggatgcccacaaagctctgtcacattccagtacacagcatcaaaattctgagttttcgaaggcatttttaaagttgtaatgtactccaataaaaatttcaaaagtccctgataataaaactgcattgctcaacactaaaccctgtcccccaggccatccatctgtttatatctctaagctagttaagcctggagacaagtgtttgagttgagacccaactgtgtgatccatgatcctagcctctgaaggctttgccagacatgtggggaagaaagaggcagtaaggggcaaaatggagttcctcagatacatggctcattcccttatcattaattagttatcaaacctgccaacctgctcaacagacgctccactgaagagtgaaggaaaagtgtcacgcaatgaagcaagttctcttcaccagatgttttttcgtccacacacatctgctttaaacttcaaaaatcttgacatccagagcaaggtctgggatagtctaacttgcctaacagaggaaaggcactcaagtcttactgaagttctctagagtagtgacaatacattttattcaaatacaaagttaaagcatttctaaaattgcaccttttcctcatgccccgaatattaagggggcaactgctcaggaattagccaagaaaaatcataaaaatatagccaatatgaccatgagagcaaaggataaagacattaccctttattttttaaatatcattttaatgatttttaaatgtattattctccctataaatgtagtctgctttcaaaaaatggaataaacacaaaaatttagacttacaaaagaggataaattagaatacactgatgaacttcattaaatgactatttttatatgaatggttttcaataaaatttctagatctagtgtttaggagtttttaaagaaaataactcaatgtctaaaatttcattcttcactgttttcacaaacatttatcccatcccacagtaaaaggcaaagcattgtactgacacattttttaataatgacaattcaaatcagttttcagttattaattcacgctagcttgaaaatctcagaagaaattgtctagaatttaaattataaaacacttttaagagaaattatttcattacttgtagtacatgcataatgcaagttaatttaacaaattatttcttagtggaagacttcagggaagcaggacaaggagcagctaacacttagaatctaagatgtgccaggcattgtctttcatagcagaactcagcaaagcagaaatggggaacctgaggctcagagaagggaagcagtacggtttaagtcattttactaggcacacagactggatttcaagctggactctgggatcacaaagcctgtggtatttcattgttatattactctgaaatctactcagtatagataaggatttgtacttgttacacattaagaagaccaaattccttacaaacaccaaaagacacgaaacatcaaacacaaacaccaaataactcttaaaacattttaaatctctcttaaggaaagcttttaaaccataacgaaacccagagaccacaaaagatggccaagatcaatatatttgactagttaaaaagtatttatagcgttttccttcttttttttttttttttttttttaagacagagttttactctgtcacctaggctggagtgcggtggcacaatctcagctcactacaccctccacctcccaggttcaagcgattctcgattctcctgcctggctaatttttgtatttttagtagagacagggtttcaccatgtcagccaggctggtttcgaactcttgacctcaggtgatccgcccacctcagcttttcaaagtgctgggattacaggaatgggccaccgcacctggcctgtttagagtgtttgtttttgccatttggagaaaaatgaaagtcaagagatgaatgacaaatttggggaaatatttgcaattcatagcataaacaaaaggctaattttcttaatatttaaagatctcctacaaatcaatgagacaaatatccaaagaaaatgcaaaaaggatatgaacaaaagggaatatgaatggctctaaaacatatgaaaagataatttacattactcatactaaaataaacgcaaattaaaatcacaagataccattatcaggtttcagactattatcagactaccaggtttcagatatcaaaaagtttgaaacaacatcgtgttagctgggagtggagaaaagagcagattcatatagcagtggtgggagtatggccatctgcaagaacattctcttaatccgtggtaattatgctctgtaatgctgatgaacactgaattagcaaataatgagccactacaggtagggaaaatacagggctaagttcctgcaaatctctggtcaaaacatttttaatagcatatcaacaaataaccttattttatatgtgtttctgtttaaccttttttttttttttttttgacagagtctcgctctgtcacccaggctggagtgcagtggtgtgatctcggctcactgcaagctctgcctcccgggttcacgccattctcctgcctcagcctccctagtagctcggactacaggcgcccaccaccacgcccggctaattttttgtgtttttagtagagacggggtttcactgtgttagccaggatggtctctcgttctcctgaccttgttatccgcgtgcctcggcctcccaatgtttaatcttttaaaaatatttatttacttatttatttagaaataattatatgcataaacactagccaagaagggtttaacgttttcctgatgctgggtaacatgcccataaatttctttggctttcaagttacacaataatgctgtcctctatgctttttttattggtcatcatttcatgaatctactaatttagctgcttttccatcttttccattgctgcatatatagatgttactttagcaccttctggagcagcctcacatacagatcagtgagtttcctcttcttttatctgggtgtatcatatggttgattcattaacaatgaattcaccactaatagcactataatttctgcctaaatgaagcttatccaaaatgcacatttttccccatgagacactaccatcttctcgcactctgaaacaccagacagcacttcagtactatgcttggcgcaattttaaatggcaaaatcaccattaaaaagtgcaaaaatgtggaaaacatggcacaaaataggccacaaaatggatacatttgtagtaccagagctgagacaggaaggcagaacatcatcttgtttacctcagctgggaatgtgcacatgaggtgactcaaaatgtttaccagttcatgcatgtccacaagtgactatgagagtgctgaaatgctgattcatggattacaaataaatgttagcaagtaggcaaattaacaaatacagaatccaggaataatgaggattgactgtatttatcaaaattacacactctttgacctagcaattctatttctagatatttattccacagatatgcctttatatatataaaataacatatttataagaatcttcatcaaagtagctttaatcagcaagaaactggaaaccaattaattgcctattggacatatgtataactatgatactgtatacaatgaaatactatgtaacaattaaaaacaaatgaggaagctctacatggatatggaaccaactacactgtttttcaaactttttgatcacaagccacagtaaaatccaaaaccaaatcaaaacaaacaacaacaaaaaaaaccccacacattgtcatttactacacacatctatttataactaaaatttcacaaagtaataattgctcttctacttaacaatgtattgatctcttctactgggttctttatagtctacttattgctttttaacaattctgcttgtgatttactaaattgatttagaacttattaatgtgacatgctgcagtttaaaaaaaaacactagtctacaagatagcttggctaaaaaaagaaaggtaaggtggagaataatgtatagatatggttctgccatttttgtgaaataaaataaaagacgatcatgtatgaacatgcttgtaagtacatagagtctctctggaagactatcttagcaactggcagcaacggttcctcctgtagagggaactagttgagtaaggaacttgagtgaagggcaacctatttttcaccaccttctgaaacttctgaatttgatcctgttttcatatatttcctattttttaatgcctctaaaaatcttgattaccctgttaacctacaatatatatgaagaatttcttccctgtttagatgaagacattctgattttagcatatattttaattgtccctcattagaatgtattatcatgatgtgaaactagtctaaaacgtccaatttgtttcttgtctcatgattatctaaaacataagcaaatcttaggatggggcatgaagaagcctctacttccatttacaccaaacacatatacttaaggcaaaatctgctatgttcaaagggcaatcaaaacaaacagaacaaaacaaacacgcactgtacctgacaacttcctcaagctgcttttccatcagaaattttaaaaggtcaaaatcattataagttttttttaaaataaatagagacatttgtgagtaagttttatctcacaaaaaagctttcaaaatgtgttattagttaagtcctaatgtataattaaaactcagcaaagagtagtacaaagtttgctcaaatacggttacatagaaaaatttaaaatctcagtaaaagagtagcatttaccatcagtgatatctggaagtctataatgtgtctcctgattttgagtacttaattgaaattcttccatgtactgaaaattgaagtttatggtaagagtattaaaagataattctaataacacagcaaacctgggaaatgctacttcatagcactggaatttttccaggtgtaatgattacatgaggaagaccatgaactccagcaacacgcagggtaaatgagtggcctgaagtgacacatctgagcctgtgaaagcgctggctataacagtctcggtgtggtcaagctcaagcttatttccatctagagaagcttctagcctttcagtaatgaccattttcctttggtagtgactagtagctgtttataacctcaactactgattgaaaaatgcttatgttctttagaaggccaaagcccagggctttgtgggacttctagaaatgcccagaccacgaaaagattctcatcagaaaacattaacaacacactaaaataagattctgagtaggtttaacatgtgaaacatagacacagagatttggcacaattcttctccatcaagtggcttcttaacatatcatgtcatacaaatgcaatgtgagaaaacgtacacaccattgatcctgttccaacattggagaatggcttagatagggatgagctgcacgtgtgcacttcataaatgatggattaattgcattataagaaccttcaggatgtatttgtacttaatcttagaggctaggctttccagaaagttgtatttaagaatttggaacaagtaaatttatatgcccaacaccggtactacttcagttttggtggagctctgctatataaagcagcccttaatccccaatgcaaggctttgcctcctagtggcatttaaatcaccagctttatgggttaaaagagctacaagctacctctctcatgatgttttccccaggatacttctctttcaaaatcatccacatatcatcctgtttaaattaagtcagacaaaaccatttccttaccaggttgcaagtaagttttttctatccaaatggattcttttttctgaccagaaagaagtcatcagtcactctcctcctctttaaaaatatatatacatatattgtcctccaattgttgttaacaacccccagctgcactggctcccacacccacttaaaacctctctgcttagcttcacatcccagacttgcttgcaaggaaaacagaactccaaaatcagaaccgtcttgggctgggcagttgccaagttagctgccactcttgagccttaggtcaaatggcacgccctgggacattttgcacagtatttaagttactccttattgaataaagagaaattcattttttaaatgggaagaatgaggcactgtaaatagaacagcctcctcttatcactgtagatttttgcccctggttgttagggtctttataaccagcagggtgtttatctttagaaaaaaaaaatgcaaagacgctttactgtcttgacatggaatccttaagactcatataatgcatgtcccattatggccatgaagaaactttgacttggcatgcttccctgaaaaactttcaccacttaactgtcttgggagcaacggggattgagttctatagaatcctggttacactaagccaagaaaataatcattccctctttctaaggcttgtttagatttgttcaagactaactaacaaaggatgctgactgaaaagaggaggatgtgggtcaaatagtaacaaaagtcctggaggacacttcagttatcttcctgttttatccttttattgtattagaagctgctggaaacagggccacttggttgggacttggaagttctctggtgaacagaaaaccattcagtaaaacaagttttattaaaacgcaattttattcattcaaccaacacatttttaggatttatttcatggtaaactctattatcctttgagcagatgaaactgactataaaatttcctgagtgtaataagaattacatagtcattagaattctattcataaatttttgtattctatatttcagatggaaaactttgtgagccaaaaaataatatttcttggcaagataatcactagaactatacttctcatgatggagaagaaaattacagatgaaaatctatttccaatattcagagtatattagtgatacaatatatagagatatgttcatgatttaaaggaaagaaagtcctggtataaacaaagtgtcagattatagatacttgcaatcaatatctttgtattataaaaccaaaactaattctgaaaatattaatctcagagcactacttcatcagattaatgctactcttcattgttgaaaagtttaaatatcatgtctgcctcattcaccttgcatctaagttacttactgttcttcattccatctgatccttaaataagaactaaaatgtggcttatctcttaagagatatcttcactatagtgaagatgtaacaattccaaaacattgctgaggcaactaaagaaatgagcttccaaccatgacaatggactgtcacgtagaacaaagttttaattccattcttaagataaagttattaacatcagacaaacatctataaatacctcttttcccactaccagcctaaaagctaatttgtgttctctttgatggttatgtttatgatcatgtgagcccagcagaaatgcctagtcataagtgctcactgtggcatgtgccatgtaatggaaataagtgatattgctggtgccctgagaatgaagctcctttgaagtacatgtgtttatatgtgctcgccaaatttttaataccagtaaaaccaaaaggcggtttggaattttaacttacagtaaaataaccttttatctttttaatgttccaggaagcatcaattcaatttaacattttttattttgaaaccacagcatactttggtaacagcaacaaaacaaagtactcgataaagaactttgcctattctgaaaagagggaggaaaatactgcatttgagttctaattggccacagtaaaacagtttgatttgatagagctatgtctacaatgataaaataactcattatcctttcaggtaattatgtgagaacatgcggaaattttcatataataaatcatataccatttatataaagtttaaaatcaaggaaaactaaacaatgtaccatttagagacatataaaagtgtgaaaaagctttcaggaaaagcagggggtaaacacaaagtaaaggagggagaaagcacagtagtaagatcagagaggcccacataggggcttcaaacatatgggtaatgggcaatttcttaggcttggtggcaggtccacaggtgttcattttattattgtcctttataacttacaaatttattatgtccttcttttaaaaatatattaaacatttcatagtaaaagatgaaaaaaaggataaaagggtagctggacaaatggaagcaggatcatgtacaaaagttaattatcagcattatgaacacatctgttgataggaaagaatctgaagttattctctgcataaggtggggttaacttaatggcaaggtaacaattacatgtgtgctcatcgcataatcaggctctggatgaactgtgggcctcaaatctgtttaggatgaagaactccaacacaagcttggcacaaaagccactggttaaacacacagcctctttttacttctaagagcccatatgcctcctatcctgaattgcttaagatttttctatatggaatctgtttttcattgatcgccacattcactgcttcctactgaccactccctggcagacacccttgaacttcatagggtctatcaggctcccaacaacacatgttttggtacaaggtgcaaaacaggaaattaacccatatactaagcttggctgtttatgctatatatttgcatatattctaattacctgtatctaattacaagcttaaaatggtaaagaactcatttttttcaccagaagacttggtttggtatgcctgcctttgtttatccatttattaaccatactatatacggcagcctcaataaagcacttctgtagaggcctggaaagcacatgtaattgtacttcagcaggtaaaaatacattggcttattttttctctaaaagcagagagaaaattaattcttttcagctgtttcattccagggacaagcatttgctttgcgttaaatcagcgatttgtaggctgggctttgtcagcatctcatgatctgggggtaggaggtggcaggatgggtgttgcaaacatgttcacatccaaattgtccctttacaaggctatttgcagagactttcctctgtgatccctttaaactgcctcaaaatcatctagttcttggatgctcctcattatccaacatttccaaccaatattgtttgtttttttgtgagcatgagaatattttctgtgatatttcatttttctggaacaagaatcaacttcttttaaagtttctgctaaatcatcaataaagaaactccatttggcacctaaatcatccatccaataattattgggaacctattaagttcaatatgacatggcttctgccctcaaatagttcacaatctggtggtatgattcttagaagcagtggaattttccagcgcctggaaagatatttcaaacctctatagcccctgtgtgtgtcactggagctcaaagacctatgatttattcctctcaaataactgagttcagaaaaaagattaagaagtgctggcctatgagaaggggctaggatgtgtcacagtcattgttagaaggaatgtcaactgcatggtgctaacagagcacaaggaaagagcaaattacctggggtgaggacttccagaggattcgaagaagattcacatttgatcagggttttaaagacttgtattggcccagagcttagcacagcaagagcatatgcaagttattgcgggaaaaaaataactctttggaagaccaagtgatgtggagtggccagagttgagacattgagaatgaatgaagagaaaaactagttgaactccatgaacatatacaattattacgattatttgtcaattattttttttttttaaaaaggactagtcagaaataacactgaaagcatattctgaggtcagatcaggggatgccatttcccatcaagttaggtagctcccatttgtgctataggaaattcaccagcacagggtgtgtgtgagtgtgtgtgtgtgtgtgtgtctgtctgtgtgtgtgcctgtctgtgtgtgtgctgcctgctgaaaaattaaaggtagagagcattgaagtaacagtaagagatacatgtttgtttttattttagtatacataagaagattcaacatttagcttagacgtatagtaaactaattacatatacttatgtcactcttgggttgaacagtgtccttctgatcttgggattggtgtggctctctaggtcaggttctcatttttgccctttcttctttcgggaagtcttctctcctgcccctggtttgggacccatggctatgttctctgggccagctgcagagttgttatatagaaagaactctgggagcaataatggagacgggactgaggggacaaatagaggaagaaaggctggaggtgaggaggctaaggaggtgagggaaacttgattacagactgcaatgtaaaaggacacgcatcatatttgtcctagagggtccccaaaaagagaatcaggatctactgatgaaaaccaaaacccaacagctgcctaaagatggcaacagagcatcttgatttgtcattacagctcattagacgaaagggcttaaaaagtttattagttatctactgctacgtaataaattctctcaaaatgcggtggtttaagacagcaaacacttattatctcagtttctgtgggtcagaaattccacggtggcttcattgggtggttctttagcaggctctccgatgagatttcagtcaagatgttgccatagactgctgtcacctgaaggctcactcagatctctgaggccgttggcaggaagccccggttcctcagaagcagctgttgggaggaagtcgcagttttttgcgaagtgggcttccccacagtgctgcttgagtgtcctcatgacatggcagttggtctcacccagagggagtgattcaacagagagcccaaggaggaagccacaatgcctttttgacctagtctcagaaatcagacactttcacttctgccataaatttattggttggaagcgagtctctagtgtttggctcacagtcaagggcagggaaattgagttccacctcttgaagggaggagcattcaacaaactatggacaaagcacctgtaacaaggtcacacaagtggactttgaaagttccttcatacctgagattctccgattctattcatgaatcagtagacaaagggcaaacctcaaaagtgtctgttacttgagtcatatcaccttggaagcagcccactggagctctgataactaatgtatttgtcaagaggaaagtctacataacggcttccaggaaactccatcaagtggcaatgaggttcgactgaaaactgcttgtgtggtgtaatgagaacattatttacaattttgagaaaagaaagtggacacagaaaaggctacagtaggagattgtgtgattatattattcttgggaccaaaaaagtgattaacaatacacagcagttaagtttttttttttaattttggaaattgttttatttggatgtgtagaaaagaaagacttctgagctttcctcgttactagaaattactgagctccagaagccatgagtttatagttatactcttatgacagtgaaaaagtcataaagtcatgggaagtcatggtccaaacacgaagcaaattaatttatagcctgatttggagcaactgatagaaaggagaatccacttgatcttgatgactgaaatagtccccttttacaggcagaggtttatgacaaaccctgatctttatgggtccaatcttctgcttctagggtatgcagtgagcactatttatactataatcttgatgctgttaatgctggttactgacattatttagaatcaatccctgatcaaactatagagataagtacagatataagaaggcaaatgttaataatcataacaacaatggtattgttgacagaggttgaggtgaggtaggagagtgaaggaggaagagaaaaggagaaaagcgaatgctatagggtctgaatgtttgtttcctccaaaatccatgttgaaacctattccccaatacggcagtattaagatgtgggaccctgaagaggtgattaggtcttaaggactctgccctcatgaatggattaatatcttcatagattaatgggttatcatgggagtggaactggtggttttataagaagatgaagagagacctgagctagcacacttagccccctcaccatgtgacatcagtgtgcccctatgggactctacagatagtccccgccagcaagaaggccctcatcacatgcagccccttggccttggacttctaagcctccatgactgtaagaaataaattaattttctttacaaactactcagatattctgttagttttaggtattctgttataagcaatagaaacagactaacagaaaacagtgcatgaactttcctcaacttatatagttgaagtggtgaggaatgtttgatagacattatataaagttaatatatcaagaaacagtgtgctaaaatacaataaaattaaacatattatttcaagttagagtagaattccaacaaaaatcaagaaggaagggaagtgggacatggtgtgagctaagtttttaactttttcacagcaaggggtcacaagttactgactaatcaagaaatagatgtgtgagcacattctacagagtgagggtgtttcccgtgagaataaccagaaccaaagactgactggtggctctggaaatggagtgtaaaaggtgactttcacatctttgattcctgtccttctatactgtttgaatttactttgtttcctatccttctatactgtttgaatttattttcttaccaaatacttcacattcataacttttatagaaagttcacataattggtagcatctataagttgacattagcctatgttcgccaggttttagtagataagcttcataagcatcaacgcctccagttaatgaacggcaaggtttcacttatttcataaactggcacttcacacttaatgcttcctcttgaaataaagagtaggaaccagtttataaatcactacattggtaataaaaactatataacgtgagctaaaatactatgacttatccttaaatatgcatttctgtaccaccaaaaatgaaaagacaaccaaaaagacattacagttttcagggttaacacaaatgggtaagagtccaggctcagcaaagtactgtgatactcctttttaggaataatcgatgaaacaattttaatgccccccccaacccaccgctgcccaaacactaggggttattcttctgaggttttttgtttgtttgttttactatactttaagttctgggatacatgtgcagaacgtgcaggtctgttacataggtatacacgtgccatggagggcttgctacacccatcaacctgtcatctacattaagtatttctcctaatgctatccgtcacctagccccgcaccccctgacaagctctggtgtgtgatgttcccctctctgtgtcgatgtgttctcactgttaaactcccagttatgagtgagaacatgtggtgtttggttttctgttcctgtgttaagtttgctgagaatgatggtttccagcttcatccatgtccctgcaaaggttttatgtaaaccccatgtccatcctctgcttatgtttaaaaccaaccaggttgggtttaactatctaactggaagaatattcaaaggattcaacaacgattaagacaccaaagaagaaaactagtatttgtcttggtttaacaaaacatgactgttaaaaagcacatctccttggaggaacctaggtactatgtgcagagggtagaaggagacagtatggcaaaaaaaaaaaaaaaaaaaaatacagctggtggttagtgtccaggtggagaaaaaggccttttatataaagtgtagtttttctctgaggaatgaacaaagagattttatgaaaatgttttgggcacctatagaaaaagtattttttatacccataaaaaacacacagtcttctattttataaactatgaagggacgtgtactatagcaatcgacaacaatcacacaatatacatcaggcaccactcacgctttctgtaaggaaatttataggaagggttaaactaccacaacccccgtggatgacctatagtgtttgtattaaaaaaaaaaaaaaaaaaacagaagaatggactaatacactgagctatcaccatacagtagaatataacacagcaatgaaaatgtacaaactcctactgcatgtaacattgttgaatctaacaagcttgaatgctgactgaagattagacacaagtgatacgtattcctgattctatttatataataaataaaaccaggcagaactaaccatggtgttaaaagtgagcatactgtttaactttggaggggataaagaccagaaggtgtcaaaaggggacttctggggttgtggcaaagttctattttttttttaatctgcatgctggttatagggggtgggttcactttgtgataattcatcaagcagttgcagttatgatttgtagacttttctaaatgtatgtatgcttcagttaaaaagttaactttaaaaaaataacaaatagtgcccctgctagtgcatgtgtcacctttatgcagatttttttaatgtgtcccctctggagagatggattagaaaaaggcaaccctgtggtcagcggcagccccacaactctgtgccttcacagagggtgggctgggtttcatccccactggtgcttgggtagaaacaaaaccacacatctggatggaaatctgcaaatctgcgaaaatactcatttgaccctccctcaccacagctttatcaggaggccagggcagatgtccttgttttacagatgaggaagtagcatggaacagcaagaccaatgcacgaaggtgtcatggttaacgagccacggagccaggactgacctctaaggccagtagctcttcacatgcttctcattccttttggggaaggggaacaggaagaagcctctctattactgtgtgccttgttatgggtcacctcaaatgctttgtggaataagataggacatgaatacagggtccaacattcttaatactggactttagtaaaggtccttggttctaagcttatttgaaatatattctctaagtgtatacttaaaaatgaacattcatcttttacatgcttatctacggaaaaagatcagtagaacagggatgttcagatatcaataaagcatgctgaccctcccgcagtttaaaattattgacttaagggtataaatattttcattttttcttggaaaaaaaaatagaaagacacacacaatgtatatgtctcacttacctagaagtgtctgcttattttgggaggagtcaggctcggcagaacatctgcatgaacggaggacaatcactccgccaagcacgccatcttcactggcaaggaaaggtgaacctaggcagaaaggactagtagttatttttcagtgaattttactttttaaattttcaattttcatttgattattagaacaaaaatgtggcatgaataagaaaatgcccattttctgataatcaccattgttcatacctcattatatacttgatggcaaaggcaggtttatgcctgaataggggccatttggcaaagaaaatgccacatgctgtcaagaagatgtaagtgggggagggaatgtgcattactgtattcagaatggaattggaaatgctaccagattaaaggaccaaaacacaaatacaggaaaaaatgctcaatgactccctttgatcaactcttagggatcacttaccacaggctctccctgctgtcagggacacaccaccaaaagcttcagtttactaccttaaatgcaatttgaaacaataagccacaaactttattataaacatttttaaatgcttctgatggttcgcacaaataagggtgaaactgcatttctatgatgagagtctggtggttagaaagagttgggcttccttgagatctcacacactgaaccattgtgaacatttcaagaacattatattttaaaacccctcatttttcttgcccaaggacatcttcttcaaacatctggcatagcaagtgagcacgtggaaaataaatgcaaaattaacccaagaactatcaaagagagtagtaaaaaatcaaaaccaatcaaattggatttggtgggagcttctgcttaaacttactatattaaatacatgtatttttctccctccctctccaaatcctagtgaactgatgggaaaggaagaaagaagccatagcccaataagggcagagaaagaggcagacaaggaaaaaactgaccttttggaaaacggtaagaagacagacaagtggttgctcacctagcaaacccatgaaagctgaaacctaagttttcatgaggcaggggaaaactggagtggaggatacccacaggaaaccaaaccagttttgctgtaaaatgcaaaaaggttcagaaattgtaggcttcaagatcctctgaaggcaggggtacagggtagagaggataaaagatggtaggttgacagtgtccaaaagaatcctctagaccagaggttgtcctgctaagaatgccattattttgttttgtttttagtttttaaagggttgttttaaaaaaaaaaaaaggaggaggaggaagagaaggaagacaacatgccacagagaccgtgacacaggctgcaagcccataatctttattctctagctctttacagaaaaactttgccaactcctgatctagaacaggagatcagaactgcaattcctttccaaaaaggaagtgactcctccctaacgctgaagaagccaggatatttactctctaaagaaggtgaactagagagttgagacttgggagcatcagggttagcccagggcaggaaagaggctacacactgaaaacagggagctgaggtgtaagtctttatgctaaacagtgaaataaccagctcccaggatgcaagaaatcaagctgatatcctccaagaagagactggataatccctttccagcaacgcagccaactcaagactaacgacctacttgagagacacccccaagaaaacgtgtcctcgacttagggtaagagcttcaagatgacaagtatgactcatacactaaaggtttttagttcggcttagcgtttaactattaaatagttaataccaaacagttggtatttaactattaaagagtacagacaatctaggattattagttgttttagttaggcctctgttttaggaaagacagagaccaaaagaaataaaatagtacagcatcatcctgataccaaagcctggcagagacacaacaaaaaaagagaattttagaccaatatccctgatgaacatcgatgcaaaaatcctcaataaaatactggcaaaccgaatccagcagcacatcaaaaagcttatccaccatgatcaagtgggcttcatccctgggatgcaaggctggttcaacatacgaaaatcaataaacatagtccagcatataaacagaaccaatgacaaaaaccacatgattatctcaatagatgcagaaaaggcctttgacaaaattcaacaacgcttcatgctaaaaactctcaataaattaggtattgatgggacgtatctcaaaataataagagctatctatgacaaatccacagccaatattgtactgaatgggcaaaaactggaagcattccctttgaaaactggcacaagacagggatgccctctctcaccacttctattcaacatagtgttggaagttctggccagggcaatcaggcaggagaaggaaataaagggtattcaattacgaaaagaggaaatcaaattgtccctgtttgcagatgacatgattgtacatctagaaaaccccattgtctcagcccaaaatctccttaagctgatagacaatttcagcaaagtctcaggatacaaaatcaatgtgcaaaaatcacaagcattcttatacaccaataacagacaaacagagagccaaatcatgagtgaactcccattcacaattgcttcagagagaataaaatacctaggaatacaacttacaagggacgtgaaggacctcttcaaggagaactacaaaccactgctcaatgacataaaagaggatacaaacaaatggaagaacactccacgctcatgggtaggaagaatcaatatcatgaaaatggccatactgcccaaggtaatttatagattcaatgccatccccatcaagctaccaatgactttcttcacagaattggaaaaaactactttaaagttcatatggaaccaaaaaggagcccgcattgccaagtcaatcctaatttatagattcaatgcccaaggtaatttatagattcaatgccatccccatcaagctaccaatgactttctttacagaattggaaaaaactactttaaagttcatatggaaccaaaaaggagcccgcattgccaagtcaatcctaagccaaaagaacaaagctggaggcatcacgctacctgacttcaaactatactacaaggctacagtaatcaaaacagcatggtactggtaccaaaacagagatatagaccaatggaacagaacagagccctcagaaataatgccacatatctacaaccatctgatctttgacaaacctgacaaaaacaagaaatggggaaatgattccctatttaataaatggtgctgggaaaactggctagccatatgtagaaagctgaaactggatcccttccttataccttatacaaaaattaattcaagatggattaaagacttaaatgttagacctaaaaccataaaaaccctagaagaaaacctaggcaataccattcaggacatagccatgggcaaggactttatgtctaaaacaccaaaagcaatggcaacaaaagccaaaattgacaaatgggatctaattaatctaaagagcttctgcacagcaaaagaaaccaccatcagagtgaacaggcaacctatagaatgggagaaaatttttgcaatctactcatctgacaaagggcgaatatccagaatctacaatgaactcaaacaaatttacaagaaaaaaacaaacaaccccatcaaaaagtgggcaaaggatatgaacagacacttctcaaaagaagacatttatgcagccaaaagacacatgaaaaaatgctcatcatcactggccattagagaaatgcatatcaaaaccacaatgagacaccatctcacatcagttagaatggcgatcattaaaaagttaggaaacgactggtgctggaggggatgtggagaaataggaagacttttacactgttggtgggactgtaaactagttcaaccattgtggaagtcagtgtggcgattcctcagggatctagaactagaaacaccatttgacccagccagcccattactgggtatacacccaaaggattatagatcatgctgctataaagacacatgcacacgtatgtttactgcagcactattcacaatagcaaagacttggaaccaacccaaatgtccatcaatgatagactggattaagaaaatgtggcacatatacaccatggaatactatgcagccataaaaaaggatgagttcatgtcctttgcagggacatggataaagctggaaaccatcattctcagcaaactatcgcaaggacaaaaaaccaaacaccacatgttctcactcatagatgggaattgaacaatgagaacacatggacacaggaaggggaacatcacacaccggggcctgttgtggggtcgggggagtggggagggatagcatttggagatatacctagtgttaagtgacgagttactgggtgtagcacaccaacatggcacatgtatacatatgtaactaacctgcatgttgtgcacatgtaccctaaaacttaaagtataattaaaaaagaaaaaagaaacaaaagagtaacacagggaaaatttgggcaagtgtcctgagcagaagaaaagtaaaacaaaacaagaacaaaaaaattaaaaagatgaaaaatgagtcaaaaatataagaaaatcataaagctaggccagaattatccaatatgtgaataacaggagttttagaaagagagactagaaaaaataaaaggagtaaaatttcaaagaaataattcaaaaacatttccaagaattgaagatgagtgttcaaactgaaaaggtccatcaacctccccgtacaactcatgaaaaaggggccccacgaagatttaacactatgaaatattaaaatactaagaaaggagagaagggtctaaaaactttcaaatgggaagaaaagatcacatggaaagcaatggtattacagtggcatcagatttctcaacaacagcaacacctgaagctaaaagatgatgaggcactatcttcaaaatgctgaggaaaaattatttccaacctagaattctatattcagccaaaaggtcaataaagtatgaaagtggaataaagctctacaaagtctcaaagagattacctcccatgcattctttctcagaaagctacaggatgaatgttccttgacagaatgaagaagggaggtaaataatgaggaagaaaataagatctggatacagaggatccaaaacaagagaagataatgggattccagatgacacagctatgcatcaagctgagagagcaaactgtccaaattggagcatgaagccagaagaggccaggaaaggtaattctaaggggagggaaaaataaactgactgaatacatgttggtttgaaattattgagagaaaatgtttcagattttgaggaaagtttggagatgaaagagtgactattaccaaaaaaataataagacttgtacaagaaatgaaatggaatcacagtatactatgtagttaggatgtgaatagctagagtaaacaaatataaactctcatactgataagctaaaaaaaaaaaaagagggagaaatataatacactgagagaagtttaattttcagaaccacctgccatgagacattttattatcatttacagatgaagaacctgagtttcagagaggttcaatgacttgctacagccatgctatagttgagtaggaaatatggcttcccccagcatcttctgtgccatgatccttgcttcatttgtagcaatgcctctcaggtaacacaaaaatctctgaataacctcaaaatgcaactgtgtgctggaaacctccatcccagcagtactcaaacatggcacctctacaactgttccttttaccaccaaatccagaaacttcttctgggctcctatagctcatctaagctcaaaatcctttacctcttccctctccaacaagtcaacacttcaaaccatgtcaaatctgttagttctccctattacctcatttttgcctgccccctcccttcattcccactgacaagaccctcaatgtattctcattgtccaagaaaccctgcaactagctccaatatggcctcctgctctagtcattcaaatcgctaaattaattaattcaataaaaatgtactaagtgccaggactcttccaggcattggggatacagaagtgaacaaagcccctgcatacatctagttgagcagcttgggggacaagtattaaactcacaaaccaatatggaaatccacccaatagcagtaagtgctatgaagaaaatgaaccaggtaaatgatggagagtgtcactggggctgagccttgtctacattaaagagcaagaaggcctcttttggtaaggagctaaccatgtgataatctgaggaaagaccattccaggcagatcaatcagcaaatgcagagactctgaggtgagggagggtcagggaagagaggatagaacatgctttcaagagagaggcagggccaggtcacagacagtgataacatttatctggacttgtaaaagttacttagctgtgcagaatgtagtggcaaggcaagcataaaagcaacaagccactaaagaagctgctgtggcagcccagttgagagatgacagtggcttgggtgagccttgtgacagtggaggctgtctacagaagctgggtctgcaatatattctgcaagtagaactaatagagttgttgatggaagggacatgagaggcatgggaaacagagacttcaaagtttactgtaaaaagagatatgcatcccagccatggccatatcattaaacaactgaaaaacctgtaatagctcccaactgcctgtagaatgatgcccaaattccttagtctggcgtagcctttcttatccttcccaatcttatcaccctgtttattttacacatcatttgtacttcccaaactccactcccctaagatttccccctgggcccactgttgtgaactgtccttcctggctccctttccccccataaactgagtctgttctttaactccagtgccttttatacagatccagactttctggggtaaaggtatttgatttacctttaaagccccctagtgattagcaaaacaattccaccacacacacacatacacagacacacagacacagacacagacacacacacacacacacacaccacacacatactcctgcctacatcactgaagtgtggcaaagagaatggcaagaaagaagagaatgatcccagcactttgggaggccaaggtgggtggatcacaatgtcaggagttcaagaccgtcttggtcttgaaggccaagataatgaaaccctgtctctactaaaaatacaaaaattagcctggcatggtggtgggtggctgtaatcccagctactcaggaagctgaggcagagaattgcttgaaccccggaggtggaggttgcagtgagccgatatcgtgcccccgccctccagcctgggcaacagagcaagactctgtctttaaaaacaaacaaacaaacaaacaaaaaaacagagacagagagagaatggcacttttacataagtgctatgaaagagagcaggggccccaggctaccatgcaagcttatatcagtgttgcatttggtatgagttcatccaattatttaatgaaagtatggttagagtgcatttcaagattccatattttttgtggaaaatactcagatttttatatgatcaccatggtgccggaaaaacactaacacagacagaaaaccatgttttagtcttgggatagcaactatgtgttattaagatataattttttaaattgcactcttcagttttttcattataaataacagatattaaaagacatctttgaaggctgttgtgaggactgaatttgtatgtatgaactttttaacttctaagatgctatttaaacatttggtggcagtaacattgatggtaaggacccttcagcattttgctggttttcaaagactatcatgtggaacaagatctattactatactggcctagttaatcttctacaacagctggaaccagtgctcaactgactagatggtggtggtgatagggtatcaatttccctagctaaaaatgttgaagtgtctatataaaaggaaacattatttattcctcttactagtaaagaaaacaaaaagaaagaaaaattaacatggaatgacatgtggggcactgcttaagcgctttctatatccacagagggaactggggacaaaaattaataaattaagacaatcttaaattccattaacatatgtgcaagcagctgcaaaaaacaagtggattagtaaagaagtaagaaagaagatcaaactttattcactataataatctcaactagatcccttaaatacctaagtctgtaactgctatggaatgaaactgtaattacagatggtgagacacactcactgtgattaaatgtatgtaatctggacattcacttaggttgtaaatccagactatacacaaattacagacccacttattgtatttgtgctataatctttaaggacgaaaacactgaagaaatttgagaggagaaccacaatgaatattaaaacagagcagttaacaagaatttgaatgcatattattttggttgctagtaacagattcctaattagaaaaatctaaagcagaaaggggaatttgccagctcataaaatctaagaggaaaaaaaccaaaggggttaaccctggtatgatcaactggaaccacaaggccagtggagtagagttaggattagacaaacaaatccacagatgtccacaacacacaaatggacagaacaaagagccaaggaaccaggaaatcagagttccagatttggtgctgtattcttgaacaagacactctatctctctgaaccgtgctttttttccttcatctgaaaaattagacactggactagtagtctctgatgtgcatgtatagtgttaggagtattttcagtattagagattcatctctacccacaagcacaaccagcattacctgacactagacaagccaaaacatcagagttccttttgcaaaaccggacacacagcttcctcttcaacatgtgggaatttatcaagagaggcattctgtagctagaaggtagctgctagtgttccaccttcccattacatttaataaagaatttctgtcctttcaatgaatttctgtgcattgcttttttctttttaattcctatgcgccaaatcacttgaatgccattctctctttgaggaattacatatctatggagaaaaataaatatattgacacacagacagtttggaggtcaggtgagcgagaaaatactggggaaacgatgaatattctctactgaaaacacatacattaactccagaacaaaagattataaatatattatttaaataccaaagtaggataacaatttatacttcctggaagatcaaggactttttctcttaagatgcacttaagtctacaagattgtctccatcgtcctataagatgtatattaagttaactgcattctaccatttgctgctcctacaaaaatcccaatggaatgatgttcactacactcactttatagaagagaaaccaaaggaaacaaagaaagaaccttaggcatatggaggtaaatgagcctacagaaacacaaggaagaagtgggagctgggcattaaaccactggtccaggtctctgtctataaacccagaggactacctgttcctgaagaatccacctccagcccagcttatgggtatcatcactgtgtgccattttctggtgataagcataatattaaggtctccaaattaacttttaaagaggagaggagagttgaattgaaaacagagttaagtttggccaataaccattttgaaatcccttatctaacaaaatttaaaagataggaagagtcaccttatttcagaacagaaaattccaaacttccaaaccataatcaaaactataatcccatatacatatgggagagatattcaatcttcggataaatttactgactctgccacaaagattagcagtaataaaccaaaccaaactgagaattcaattaaagcctcagcttcttgatttaatcaatcatatatgtacctaatactgtactagaaatgagacaagagatttctttgttgcttttaaaaagtttaacacagggagctgtcctcaaggaaataattcagttgagaagaaaaaaacaacatattttgaaattcataaagcagtctaagaagaatcagaaggcatcttctttttctgaatattccatcccagcattctatctgcaagtggagggacctgggatcccacaaacccatcatccagcaacagtgatgagttgagacaggtgaactgctgaccaagggagcaagcgggaatgtcctacagagaactgaagactcagtggaggggaagccaaatggcctaggttttcagccctagttccagcattctccatgattaacttttaggtaagaagttcttcgccttcagaatctactaccctgccaacccctagatgcaggagaatgtagtgaacaccttcctccctgtttccagctgctagacctccatctccaggagtatcacaaagtagaagagggcaaaataaagccagatagtggcagaaggcaaactgtcctttgtgggagcaggtagggtggtatagatgcatatctgcatattaatactaaactagaagccatgaatttgagaagtacaacattcattcaacaaatatttcatattttataaaagttcacttcacaatatttaagaatcagttctgtaccaaccaatgtgtacatactgaataaggtaaaattggtggtctcaagtcatctatgatatgataatcaataaacaatcaatgttagaagggaaaatcaagcaggataagagagacacagttgtatgacaggtatggagggagacagtattttaatcaggatggtcaagcatcctctctgagaaagctaaaatttagagaaaaactccagcaagtaagagaacaaacaacataggtactggaggcttgagacaaaaatgtttccagtgtagtaaagaaatacatctccacagacaatttatataacacagatactaggcctaatgaccaggtatgttcatcattttacatcaagaaaaggaggggctagttggtattccgctgattgttaacagttggtatccttaatggttgttaactatcttgactatcccatgacaaaaagtaaattttcattaaattactgttcttctaagaaatgtactacaaaaaccacccctgtaggttttaaataacaacaataataacaaaaaccccacaaaataatacaaaatgaaagtatctgtcttactccaaggcctattctatagatgtaagtaccatcaagagttccttgtaggcaaaagccacaccaaggcaattttcaatgccctatattcactgtcacttagccctaaaaaaaattcttcttatcaataaagtcacgaaaaaaagtttttatcagaaaaaacggagttctttgtatatcctttctgaaattatccatatgtaatctgggcatttttaaaacttttcattcaatagatcatgtcatataaactattctcaatctgactttttaaattcaacaatataactcagagatcctccatctcagcacacacaaatttagcttagacttttcaacaatgaatatgctcctggacatagatgttatcacttctttatttagtatcctattgatggacatttagattgttaccaattttggttttttgccattgcaagtaatgccacagtgaacatctggacatatttacctttcacacgtgtatgaatatatctataggacatatttctaaacacagagttgatgaatcaatcagcatactcatttatttgctacagattcctaaactttcctctaaaaacatttatacccacaagaaacagtgtttgagagtacctattttccctatggggaaatgccagccttacaaaaactgggtattagcaaactttttgattattactaatctgatacatgaaaaatagtagtatcacactactgtcttgatttgtatttatttatgaataaggtaattacctatatgtttacaagccatttgtgtttctttatctgtgagctgctttcacatctgtggcatacacaactgtttgcctacatattatccattctccctatcttccttacagtaaggcaacccccaattttgtttggggcagaaaagtgcctagcttcccaaactcttttgtggctggttagctaagtggcaaagttttctagcagagcttattaaagggcagacttcactagcacaaattttattggctgctgccatctgcttcagactttgtgcctgaaagtggaacagctatcttgttctcatgaagaataaagccacctactaaagacagccaaacagaaagaggctaagccccaaatgcactatgaagcctgtgtgccaggctgaaaggctggattgctttcagatgttttatgtgagaaaataaaagccctcattttgttaagcccttctgtctggatttgtcatatcaacataatcccaaactgaaaatttccttcatccagatctttattgggtacttgtatttttttcttactaatttgctatactctttacttattaaggcagtaagcccttggctattatgtgttgcaaatatttttccccagttggtcatatatttgttaattttgtctatgatcttttttgtaatacagaagtttttaatgcttatgtaatcaaaatatgtagtctctttcttctaaggcttctgtgttggcagttttacaagaaaggtcttccctaatcaaaaattatgaaaataacttatccatgttttctatttgtgcttttacaattacaatttttaattttagaacttcagttcttctggacttaattttggtataaagactacagtgaagatcttgttgctgttttatattcctaaatggtcagccaattgcccaacataaatttcttgaaaaaggcctctcttacccattgacttgaaatacatttttaatcacatagtaaattcccatatgtatttgcatctgtacctagattatcctgttccattgatgaaattattcctatataaatttcgagtggctttattttcacaatattctttgctgctttcatatcatttttccacattatcttaaacatcagcttgacaaatactcttgccttgactttaattagaattttcatatggtcataatttaattaactgtgattttgctttagggtcagaatgtcctgataatattttcccaggaaagcctaaagacagagtcaattatagccttgtcactccaaaattctgggatcatgtgtattcttacacaaagaaacgtggcgtggtaccctaaaataaaatacgcaagtagacttgtacataatttaaaaggatcgcttatgcctttgatcaaataagtatctttgtagaatgtcttctgagatgtacatagtaggaaatgcaacatttttttcacagtcagttcttactctgctatctattttatttgccacaggctataatcaccatccataatactccaagaaaataattctcagcaaccctcagcctactcccaaaaaacaggacgaaaagaacacaaaacaaaccaaccaacaaacaaaaaaaacccttagttctaagaggggttagatggcaagttgtcttcgagtgaggtaaaaacacccaggattggtatatttttaggtcaattaatcatgtgtatatggaagaattcactgatacagtgtttaaaacatgtatagcattaaaacttttttttctgggtgaatagagtgtttgctcattaaattctagattctatgtgtgctaactatcttatggtatctacactatagtccaaaggcaccagtgctcccgagcaatgccttttgcttcaggaggactatgctggtatcttttatgtggacttggtaaacaaagttgatatggccaaataatgcaggtgagcaacttggggtacatgggactgtctccaccaatcactgcctgaagaccttccaaaggacatcggaccttaaagaacattatacatttagttattgttgctcattgtgtttccttctctgatttatttccttatatacccaattttaccatgagagcaactctattcacttttactttgtgtggtcagatcccacttactgtgcagaagcacataacatagaggccttctagcacgcttttaattcctatgtaaaatcagtttaatgtagctttgtgtactctcattaactttgtttttaagtaagtaaataaataaatctattttattgtgacaacaatggctttgcacagctgctgtgtgggaagcttgataaaatggtgattgctgatattccagtttctattaagtttctggattcttcaatatttttcactttgatgattgtactgagaggttatacagttacataattataaatgcatactgttatacgtgaacttacaactctaggtctagaaatactgcaatgtttacattgtgaactttagatgaaactgtcacatatccctatatagtgaatcactgtatcctgaaccctataatagggagtcacccattaatgcaggaggacttttacatagaaagctataattcaattgtacaacatatcagtgcaatgatacacagggtgttgcatctcacttgaatgtacttctctatataaaggcataccttgaagataccgaaggttcatttccaaacaacttcaatagagcaaataacacaataaatggcaaatcacaataaagtgagtcatgcaagttttttggtttcccagtgcatatgaaagttatgtttacactactatactataatttactaactgtatagcagtgctatgtctaaaaaatgtaaataacttaatttaaaagtacttttattgcaaaaatgctaatgattatctgagacttagatgagtcatatccttttgctggtgggcggtcttgcctcgatgttgaaggctgctgttggatcagagtgatggctcatgaagactgaggtggctgtgacaattccttaaaataagatggcaatgaagtttgctgcattaattgacttcctttcatgaaagatttctttgtagcatgcaatgctgtttaatcacattttactcacagtagagctttcaaaattaaagtcagtcctctcaaaccttgaagttgctttatcaaataagttatgcaatatcctaattctttgtccttatttcaacaatgttcacagcttcttcaccaggagaagatttcatctcaagaaatcactttctttgctcatccacagaagcaactcctcatccgttaaagttttatcataaaattgcagcaattcagtcacatcttcaggcaccattctaattctagtttcttgatatatctaccaagtctacagttacttcctccgatgaagtcttaaactcctcaaagtcatcaatgagggttagaatatacttcttccaaactcttgtgaatgttattttgacctcttcccatgaatcacaaatgttcccaatggcatctagaaggtttttaatttacttgacccagatttcaaaagcaacaaatcctgatggagaaggttttctaaaggtttttaatttacttgtccccggttcatcagaagaatcactatctatggcagctatagccttataaaatgtattccttaaataataaagagtttcagtatggatattatgttagcaggcatgaaaacattaatctccttgtacatctccatcagaacccttggacgaccaggtgcattgtcatagaacaaaactattttgaaaggaatattttttcctgagcagcagctctcaacagtgggattaaagtattcagtaaactgtgctgtaaacagatgtgctgtcatctagactttgttgtcccatttataaggcacaggaagagtagatttagcataagtcctaagggccataggattttttgaatgataaataagcattggcttcaattgaaaatcaccagctgcattagtttctaacaagagagtcagcatgttctcagaagccaaggcactgacttctcctggccagctatgaaagtcctagatggcatcatcttccaacagaaggccatttttgtctgccttcaaaatctgttgtttagtgtagtcaccttcttcagtgatcttagctagatcttctggataacttgtggcagcttctccataaggacttgttgcttcttcttgcatttttatattatggaggcagcttctttccttatacctcatgaatgaatctctgctagattcaacttttcttctgcagcttcctcacctctctcagccttaacagaattaaagagagttaggatcttgctctggattgggatccttaacactgagtgttatatcagatgttctatccccataccaagctgtttcacttccttatcatctgtgtgttcactagagtagcactttttaatttccttcaagaacttttcctttgcattcacaacttggctaactggtgtaggaggcttaccttttgacccatctcagcttttgacatgccttcctcactaaccttaatcatttctagcttttgacttaaagtgagagatttgcaactcttcaattcacctgaagatgcagagtcattaattggcctaatttcaatatttttgtgtctcagtgaataaggaggccaaggacagcaagagaaacaggggaacaattggttagtggaggaatcagagcatacacatttattacacacaggtttacagtcttttatgaccacagtttgtggcaccccaaaacattaccatagtaacatcaaagatcactgatgacagactatcagcacagatacagtaacaataaaaaagcttgagatattgcaagaattaccaaaatgtgacatagaaatacaaagtgagcatacactgttggaaaaatggcatcaacagatttgttcaatgcagagttgccatagatcttcaatttgttttgaaaaatgcagtatctgctaagcataataaaatgaggtatgcctctattccattcttagtgaactcgctgaacatactaaatacctgctctgtactcaatgctctcccaagcagtgtgatacacatacattaaaaaaaaaaaaaaattcctgaaaaacctacaactctgttggccagacacaatttacttatataaagctagaaaacagcatatagtaatattttaaatttttatatatacaaattcatatatatacatattccatacatactataaatatgtacatctcactagaatctacaggcaactagactatctgttcaccactgaccacccagaacagtgtctgacacatagtaggtgatcaacaaatatttcttaagtaaataaatgagaagctattgagctattggaatctgagaagggcatactcactttattagggaaaggcctcaggatggagaaaagaaggaaaatccgcccttggataatgggttgaacttggttcaacatcatggtgctgagcaaacactagataatcagtcacagctcttgactatttggacaatgtgaacattgataaaggtcacaaagaagagtgctcagaatatggcagacacttagtatccactacatgatctggacctagagaaaggctgaaggctgcgtgaccaggacatgtggaaagatgatgtccctaacaggcagtgctgggaaaagagccaactgggtttagacatggaatagttttgtcaaatcaaggaactaatgattaacgaaaggagccaagaagagaagggacaggaacaaagtctggaagtccaagggacaataatgtagagaccactagatctatggaggaggagaaacaacatgaaaagaaaatcaaatggactaaaatggaaacatcagagaggaatggcaaggaactgatggtgcagacaggggaactcactgaaatcggaacagcaggggaagaaacagacctgagggatcttgtggcaaaagagaagaatggatgagggaattgctataaaagacagcaactggtggccaagacgttcaagagagtggtattgtcttcaggatctacttagcatgttgatgacacaatggtcacattaatcagggagttaactgtttaatggaattccaatatgatttttaggtgtttcaaaaagtcaagcaagcactgctagacctggagatctcatggtggaagactcgcattgtaaacattctcttcccacttgggaatggcatatacttacattgggatttaagagcctaaactgaaagggagggagatcataaaaaggtgactcatcacctagaagagtgcatggatagcatcattaattttccttcatttattctttagctagttattacgtactattcattacatactgaaccccattctagatgatgggattacatcagtaaacaagatactgatggtcccaggtcacaggaaggttacattctgatggcagaaatggctaagcaagcaaatacacacatacacatcatttacaacagtaatagtcccacggaggaaacaaacaaggggctgagagggaggctgatagggccaagaggaacccaccactgcatggtctttcagagcaggtggtatttcaattctgactaaaagatgaggaagaaggaagattggaaaagatgaggaagatgaaggttggaaagaaggatgttccagatgaagaaaataaaacatgccaaggtcctgagaagtaaagaacctaggaattgagggggaaaaaaaaaaaaacaaggaggccagtgtcctgagcaagaaagtgacctgggatgatgttgaggagacagacagtaatcacactggaaaccatgaagtagtgtctgcatttcatcctcttttcagtggagggccatcaaagggataagacagtgaatttatatcttcagaaataaaatctttagagaatgaattgaaacttgctgctctgtggagaatgatggggtggggatagttgtcaagagaagaggcaggaagactgcttaggaaacgtctgtggtagtttcagggagagttccttggtgagtctggagagacctccatgtcccctggatggcctcccttcccctgtcccagggaggtatcctagcatggctgaatgagcaaaccctcaccacagtacttagtatatgccatagcatatgctgcttagagtagaagtgggacaagaagaaacatgactgaggactgaagccaggtgctctaccgaagagagaatgtgagttactgctccccatcagggggcccacgtaccacagccaaatgtgcgcaagtggttactaacctcgacctgtcatttcaaccagattatttatatgtccccttgtcattacatgatatcaagtgcagtgccctaaggacagttgtcagagaattctgggcacagcaaggccatttcctgtgaaattccttcccaagtctgaggctctgaattccttccttgtgtcagtccctggaggccttgtttatccctggaagcccccatcatcctaattcagcagagctccaaattgttaaccttaggacactgggcaggatctactttatagcttgtcattttttactaaataaagccctgaaaatgcctaggaagacttcaccagaagtcttcactttgtggtggaatttaagctgacctgtttgatttaattgcatatttttacattctacacatgtctaggagccttgggctgtggagaatcttttactgtgtctaataaataaaacaaaaataaggaactgcaggatcaaacaataaatgccttcttaaaaaaacagggaaaaatgagagccattaacttttaaagtttttaaaaaacatttttggagagtaaatcttataatttaacactgacaaaatggctaataagatagcaagggtaactgaaaattattaactcctttccttcatttgtattggtaaaaatatctctgccagaattaatacagggggtcttcaaaaaattcatagaaactgtgcattatgaaactatgcatggatttcaaaaaatgtttgcatgaaaataaactcacactaacttgttataacatgtctgaaagagatctagtttgaagcactaagaaatataagacatcagtttgaaaagagcccctctcatagtgacatcaattctactaaagttgaagaaagaacaaacatcaaacttatggtgaaggttgggtgggagaatggtggaatcactgatgctttatgaaaagttcatggggacaatgccccaaataaatcagcagtttacaaatgcattactcattctaagaagagacgagacaatgttgaagatgaagcctgcagcagcagaccatccacatcaatttgcaaggaaaaaaatgtgtcttgttcatgccctgattacagaggactgacaattaacagcagaaaccataaccaacaccctggtctgctgctgtgcatttcatcttcaacactgtctcatcccttcttaaaatgagttatccatttgtaaaccgctgatttacatggggcattgccccataaacttttcacaaggcaatagatatctcaattgcttcagcttacacaatactgactaaaaaatttaagttgaacaaactctccactcgccaggtgccaaaagtgttgcaaccagatcagctgcagacaagagcagagctttcaatgggaattttaaacaagcgggatcaagatcctcaagcacttcttcaaagaactataacagcagatgaaacatggctttactaataggatccagaagacaaagcacaatcaaagcaatggctacaaagagatggaagtaaacccatcagagcaaaaacataccagtcaagagcaacggtcatggcaacagttttttggggatgctaaagacattttgcttgctgactttctggagggccaaagaatgataaatctgcttattatgagagtgttctgagaccatcagccaaagctttagcagaaaaatgcctaggaagacttcaccagagagtcctctaccacaacaacatcctgctcactcctctcatcaaacaagggcaattttgtgaaagttttgatggaaaatcattagccctccaccatatagtcctgatttggctccttctttttgtttgctatcctaaagaaaaaaacctgtaaagggtgccaattattcttcaattaatgatgtaaaaaagactgcattgacactgttatatactcaggaccctcagatctttcggaatggactaaatggctggtatcactgcttgcaaaagtgtctttaactggctgaagcttatgttgagaaataaagtttatatttttaattccatttttcatgaactttttgcagtcccttcacgtgacatcagtggcattgaaagaccaaattgatttgtcagtcacctttgtcttaatttatacaggagcaagcacatgacagccaaacttaagtcactctaaggaaaaataaaataataaaataaaataaaaagcttgtaatgagaaaagaactaaatacaaaagcaagtacctactaggaaaaaaatggtcagaataacccacaagccagacttttctttttgttcacaacatacaagaaggaaaaatgttttaaaatgggatcctatgagttcatgtcctttgcagggacatggatgaagctggaaaccatcattctcagcaaactatcacaaggacagaaaaccaaacaccgcatgttctcactcataggtgggaactgaacaatgagatcacttggacacagggcagtgaacatcacacactggggcctgttgggggatgggggactgggggagggatagcattaggagaaatacctaatgtaaatgaggagttgatgggttcagcaaaccaacatggcacatgtatacctgtgtatcaaacctgcacgttatgcacatgtaccctagaacttaaagtataataaaaaataaaaaataaaatgggatcctataaattatatacattattttaaaacccaaacattcaggtaaataaaatgtaaaaagcaggatggtatatatacgataggatggctttagggaagtctaaatcaataaataatgctttatgctcaaaaacaacttttactttatagaatttttgtaagaaagaaataaaaccacaaaactttattgtagtatacttaaaggatttaaattaacctaaatttacatgaagaaaaatattttatagatgtttttctgtatatacacatatagataaactcacaactttttaatgctttttttctttttaattttattttatttttcaacttttattttagattcaggaagtatacagtttcttaaatagtcattaatcatctgtgataaggctgcaatgtcactcttaagaattctgggaactctacctacagaagaacaagtttatccaaatatgcagaaacacagacattcacaatctaatagagctatgttaataagctggagtaaacactgaattatcacactaattttagtgattccatataagcagggtctgttatggaactatatcccggaaggggctaataactaaaggacaaaaagaccctacacccacagaattgcctgacagtgtaaaaatcaagtgaagaatcactgtgaaattcatttttttaaaaatctaaatttcaagaaagatgttttcatttgtaagttttcaattattgcattgtcaccaaaagagtactaaatatagcctagtcattggtggtacacaaaaccttaactgagagtacaaaatatagtcaagacagtagtggtacacaaaacctcaatctagtgtgtaaacaaaaaggtcaacattagaagtaatggtcaatccgaaatatttcaaaaccgcacacttattttagagccatttgttaacaagagcaagttctacacattcaattgagtgaacagtattgttttgatggtgaacaccctaaaggaagaaaaagagtgccagtaattcaaatttttaatttccacagtttttgttgttgttgttttcgtttgtttgtttgttttagatggggtttcgctcttgttgcctaggctggaatgcaatggcacgatcttggctcactgcaacctctgccttctgggttcaaatgattctcctgcctcagcctcccgagtagctgggattacaggtgccccccaccatgcccagctaatttttagtagagatggggttttaccatgttggccaggctggtctcaaactcctgacccttggatgatccacctgcctcagcctcccaaagtgctgagattacaggcatgagccaccactcctggcccatagttaagcttaattatcaatttctgggataaataaaaaaaagaatcattcactttcttgacccatccagctgggctccatcccaggactcctaagccctgtggttgttgcatgttcatgttagttaacgccacagctcagcgaaaaaacaactgatctggggacaagcaggtcaacttgccaacatacaacattagtacatgtgggttcagagcactctgcatttttctttcatattctaattgtgacaaacaaggctatataaggtttaaaattttggcaaatgtaaatgaggtttatggaaacaatattcatgtcatgcctgaacaaggatagtgtcttctactaaaaccagattgggatttcatgtcatgagacaagtttgtgtagcagttcatctactggcccctagaggccactctccatcacccctcaaagatttatgcccctggctgatatccgtcctgtcataatacctagttgacttcatggtgcatggagactatccttccaactccatgacttctcaatttttttacctcttactttatttatgttacccactcactccctttatcgtcccctagtctttgtgatttcccagtaacatcacctcttgcgtgaacctcacttgcaagaatctcactaaccacccctaactgcacagtgcataccttctggttcccagactccaacaacctccctcccaagtcctcattttggccctaagtagccaaagtccatagtccatcattataattaattctctgcagaaaccatcagctaaattggtctgctcttgccccatcatactcacctgacaaaattccaaccataattaaatcttactccatgcctgcacccataaaccaaactttgctgaagataattacactaccatgctgaccatgccttctttaaattcatggtcactatcttcaatttggacccttaatgctgcctggcaatacataggcaagtactgacctatactttcttgtttttcctcaaatttccaatatttcctcctccatgggaactctgctgctgtctttccctgggagagacagaagcagaaagaactttcatcagcccccaccacatcttgattcaagacttgcctcctgttactacagatgaattgctcatgctcctccaaggtcaatagcttcacctgttgactaggtctactgcttcttgcctcctcagggaccttcacctctgcccgaacacacacatcattaatttgtctctttcatgaatcattgtcctgtattatttgctctaacttctcatctatagaaaaacatacacatttgtcttctatatagacaagaaaaaaacactttcctctccagctaccaccccattatcttcttcaagaaaggaaaaattccttcaaagatgtgtctgtactcactgtttcctatttatctcctcagtctcttcccttacccactcacactgggatttgtatcccctccacttcatccaaacctactgtgaaaggtcatctatcaccaccacagggtgctagtcagtgatcagttccccagtcctcctcttactgctcatcggaagagtctgacctgctgatcgtgctttgctgctttctagcacttacttcacttgactttcaggacttcacaaactcctggattttctccagaagcaccagccactcctcctcaatctcattgctggttcctctttatctctttactttacctttggaatgttccagagctcttcaaggtcttcttttatctgcatcgattttcctgatctcatatcatgtatcactttaaaatatcatctgcacaccattgattctcaaatttattttagctcaggccttatccctgaacttgacacttatatatgcaattgcctaattaacatttccacttgttcattttataagcatcttttgaaactgctgatctttccccacaagacttattcttcctggaggctttcctagatcagtaaacagaaacctcatttctcttctttgcccaggcccaaaatcctcaagtcatcgtgactcttctctttatctttcaccctatattaattaattagcaaatcctgttagctttaccttcaaaaactatccggaatccaatcactttcccatctacctccattaccctggtccaagccactactatctcttaactgaattagcctaatagcctcctatctagtccgtcaggttctactcttgcctcccaaaatctattgtcagcacccaagccagaatggcttcaataaaatgtaattcaggccaatttatcttctcaaaactcttcaaggctcccatcttatgatggcttgcaaggccttgcatggcccttactacttcttccagctcatccgtaaccatccttccccttgctcacactgctccagccacacaggcctccctgccatccctcagccaactctagacacattgctaactcctttgcacatgctgttccctctgtctggtacgttcttccctccactggccacatggctctctccatcacctttggatttctgctcaaatgtcaccttctaagggaaacttaccctgaccatgctcaaaaactgcaagcttctctcctgcattttctatccaccttttgtacttcatttttctctgtagcttttattaccatatgatagactaagttttacctatttatttattgtctgcctgacttgataaaatgtaacttccataacaatatagactttgttttattattcactgttgtatttctagtgcctggcctgaaacatagtgtatgcacgaatccttattgaataataagaaaatatatgttttggagccaccccgatggaagggctctccaggattatctaggccaggaattggcaagctttttccataaagggccaggcagtaaaattttcagctttgtaggcaatatggtctatgtcacaactactcaactctgccattgtagcacgaaagcagttatggactgtatgtaaacaagtgagtgtagctatgttttaataaaattttgtttacaaaatcagttggtaggtgggattgaacctgcaggccatagtttgccaacccccagtgtaggttatttcactacatgagcattaaagccttaatcaccaattctcccagagtttattaaacaaagttcccaacttccagagctaggaagagtcgtccagatcaaggatcatctagtccaacccctgaggcagacagcagatgtttatacaagattcattctttccatcgaaaagaagccccattttgtggaggagacaatcatgtgtccagctaagaaattgtttctcagtgtctctgtaactagaggggatgatgggacacagttctagccaataagacacaaggaggcaggaccatcagagacattgtggagctggcacataggacctctggacatcttattatgagaaaaaaaataaatctctctggttaatccatgatatgtggcttccaaagagaggtttttaaagagtgaaattaagtctttgattaagccacataagtagcttttaaagagagaaatgaatcactcaagattttaaaagccactgcacttgtacatttcattatcctgtagtcatatgcagctatttagcatttgaaatgtggctagtacaactgagaaactgaacttctaattgtatttaattttagttaatttaaatttaaatagccagatgtgactaatgactgctatatgggacagcatggcttttgactgttaaagaaaagcgaagtataataaggcatgcacattgattttgatagtagtttgaagggcatgaacccttttttcctaagcatggtaaaaaggaatagctgcctttcccacatatctgccaagttcttgccccacacccagcagtgaccagtatttttggtttaaagattttccaggcatcacaagagatgttgagcttatacattcctgttctcaaaactttaaattgaatttctacatactaacagtgaacaatctgaaatggaaattaatgcatgcttgttcttaaaactttgaactcgatttctatatactaataatgaacaagttgaaaaggaaattaaggggaaaaatccatttacaatagcattaaaaagaataaaatacttgtaaataaacttaaccaaaaaggcaaaacacttgtacactgaaaactataaaatatttttaaaaataaattaaaggtacaaaaaatggaaaggcatcttgtgtttatggagtacaattaatattgttaagatgtcaatactacccagaatgatctacagatttaatgccatctctatcaaattcccagtggcaattttggcagaaataaaaacacccatccaaaaatttacatggaatctcaggagaccccaaataaccaaaactatcctaaaaaagaacaaaattggaggcttcacacttcctgatttcaaaacttagtatgatgccacagtaaccaaaagagtatggtaatggcataaagacagacatatagatcgatggaatagaatagagagcccagaaataaacactcatatgtgtttaatgatttttcaagacgggtgtcaagaccattcgatggggaaaggatagtctttttcgataatgatgctaggaaaagtggatatccacatgcaaaggaattaagttggacccttgctttacaacatatgcaaaaataaactcataatgaatcaaagatctaaatgtaagagtaaaaactataaaactcctataagaaaacacagggggcaagcttcatgacattggatttggcaatgactttttgtatatgacaccaaaagcacaggcaacaaataaaaaaacaggcaaattagatcacatcaaaattaaaattaaaaagttattctgtgcatcaaaggacatgatctatggaataacagaaaatatctgtaaatcacatatctaataagaggttaatatccagaatatacaaagaacttttacaactcaataacaaatcaaagaactaatcaaaaagtgggcaaaggacttcatacacatcttctccaaagatatacaaatggccaataagcacatgaaaagatgcttaatgtcactaattaataacaaaaagcaaaccaaaaccacaaagagataccaacacatacccattaggatggctactatcaaaaaaagaaaaaacccagaaaataacaagtattggtgaggatgtaaagaaatgggaaggcactgttgggaatataaaatgtgcagctgctaaggaaaacagtatagcagttcctcaaaaaaccaaaaccagaattaccatacaatccaggaattccatttctggatatttacccaaaagaactgaaagcaaatctcaaagagatatttgtacacccatattaattgcagcattattcacaacagccaaaggtgttattcacaacggccacaggctaaattgtatctcctgctccccaaatgcatattttgaagtcctaatccccagtatctcagaatatagctgtattggagacagagtctttaaaggcttaattaaggttaaatgaggtcattaggatgggctctaatccaacatggcttgtgtcattacaagaggaaattaggacacagaaaactcacagaggaaagaccatgagaagactctgggataagatggtcatctacaagccaaggagaaagagatctcattagcaaccaatcatgctgacatcttgaacttggacttctagcctccttaactgtgaggaaataaatttctgttgtttgagccacccagtctatggtactttgttatggtagccccagcacactaatataaggaacaacccaaatgtccattgacagatgaatggataaacaaaatgtagtatatacatgcaataagatatttagaaataaaaaggaatgaaattctgacacatgctacaacttggatgaaccttaaggacattattctaagtgaaataagccagttgcaaaaggtcaaatactacatgattccacttacaagaggtacccagagtagccaaattcattaggataaaaagtagaatgatagttgccaggagctgcagagaggagggaaaggggagttgtttaatggatacagaagttcagttttacaacatgaaaagagtctgaagattggctgcacaagaatgtgaagatgcttaaccctacagaactgtacacttatggttaaagcaaggcactcacagtgactcatgcctgtaatcccaacacttgggaaagccgagacaggaagattgcttgaggccaggaattcaagaccagccggggcaatatagagagattccatctctaaaaaataaataataaataaaaaagtagccaggcatggctgctcatgcctgtagtccaagttacttgggaggctggggtgggaggatcgcttaagcccaggaggtcaaagctgtagtgagccatgatggtgccactgcattccagcctaggtgacagagcaagaccccctttctctctcccaaaaaaaaaaaaaaaaaaaaaggaaaggaaaaaaaaaggttaaaatggtaaatttcatgccatgtgtattttaccacaatttttttaaaaagcagatgactaggaacaaaaacagtatcattacagatctatcagaatagttaaataagaaatagtgacaaacctagcaaagatgtggagaaactgaatcactcgtaccttgctactgggaatatgactccggaaaacaactctgtggttccttaaacacccaaagacccagcaaacatacttttgggcatttattgtcaagaaatgaaaactcatgcgaacacaaaaatctgtacactagcactcacagtaattaatttatttataatactgaaaataaatttatttataatactaaaaaaatagaaacaacccagatgtacttcagtgagtaaaaggttcaacaaattatggtgtgtccacaccagggaataccactcagtaataaaaagaaatgaactactgatacacaccaaaacatggatgaatctccacggaattttgctgagtataaagagacaatcctaaaaggtcacatactgaatgattccatctatataacatttttgaaatgacaaaattatagagacaggagactattggttgccagggattaaagtcagggtgggtgggtgggtgagtgatagtcaggtgatgtggttataaagggggaacgtgagggattcttgtgatgattaaggggttctgtatcatgacttgtggtgaatacatgaactcacacatgataaaactgcatagaactaaatacacatacacacatgcacacacacaaactacaagtaaagctggggaaactgagtaacattggcaagttgtatcaatatcatatagcctagttgtgacattctattataattctgcaagacattaacattaggagaaactgggtaactggtatatagatttctccatattatttcttccaactgcatgtgaatctacagttaagtcaaaattaaaagtttaattaaaaaaaaaccttcaaattggaaacctgcactgaatattcttcaggttaatataaggaagaaaaataagctaataaagtatatattaaaaactcacaaaaacgtgtgaaatcttattttgagcagctatatcacaaaataagacttgcacgcctttattttgacattgatgacagcaaacatgcaaagaatcagtaaacttcagttttgatcaccttacataaatccagttatgtaagtcctctttaaaatcaaaaagccacctctggctgggcgtggtggcttgtgcctgtaatcccagcactttgggaggccaaggcaggaagatcacaaggtcacgagttcaagaccaggatagccaacacagtgaaaccccgtcaccactaaaaatacattagccaggcgtggtggcatgcgcctgtaatcccagccacaggggaggctgaggcaggagaactgcttgaactctagaggtggaagttgcactgagctaagatggtaccactgcactccagcctgggcgacaaagcaagactccatcttaaaagatagtaataataataataaagccacttccttattcttcatcagagactgaaatcaggacatcatactactaaaatgtggacatgactatctcatgaggaacagcagtggcagctcacatgtgtacagaattttctcagtttttataaacctaatctcattgtatcaatggtaactttgtgaggtaggcaaagcagacttgtctgtgcttttttaagccacaaaaatgacttcaaaagaaaactaaaaaatgttcaacaaacattgatactactttttcaagtcaattttcctatggctttttaaggtttcaaatcatcagggaagctgaaaaagtaatacaatgaagatttatatatgcttcacctagattctcatattaacattttgctacatttgagttctttcatagatatagagatggaaattaacacacatacaatacacacacacacacacacacacacacacacgacacacaaatacttttttttcctaaggcactcgcaagtaactgtcaaatattgcaacccttcatcctaaatgaagacatcacctgaacaaggacattctcctacctaaaccactataatattatcatgcctaagactacaaatagtaattcaaactaccatctattaaaatttcttcaaccatctttaaaatgtcttcctaaaaaaaaaaaaaaagctaattactcccaaattattttgtttaaagtgtcattgcttcataattatttgaccaaaggagctaatttttacctatagcactagttgtcagtcaattggtactttggttggattctttaaatattggcttctatattgataacatagtcatttgttttgcgtatttgtctctaaatattacagaatataagaagttctttggaacattgtacatattttacaagaaaaagaagggaaggaagacaaacaggattatacctgaccttttaaaaaaaggtgccctaaaaacacatacacacggccaggtgcagtggctcatgactgtaatcctagtactttgggagaccaagatgggtagatcaactgaggtcaggagttcgagaccagtctggccaacatggtgaaacttcatgtctactaaaaatacaaagttagccaggcatggtggtgggcacctgtaatcccagctactccagaggctgaggcaggagaatcgcttgaacccaggaggcggagggttcagtgaggcgaggttgcaccattgcattccagcctgagcaacaaaagtaaaactccatctcaaaaaaacaaaaacaaaaacaaaaacaaaaacaaaaaacaaaaaacaaaaccacatacacacatttacagcaaacacactgaaaattttcctaacaaatacaattacagaattcctaatcacaaattcaaataaagcctgctacttgattttaagtggtttaaatgactagaaatcttgctacttaaaacaaacaaagatactctgagcttacccaatttgaaactaaaaatcaactcagaagtgtggtaaaataccagaaaatcaccaatgtcattatgcctcagatagactatttgagaagtatgccacataagctgctccctgttgatgctaatgaatggactggattttacacattcataaaatgttaagaataacattgtttaatacacttcattcttctctcaagaatgtgtggttttcacaggctcaaaagtcatagttattttcaaatatctggtaggttttaaaaagtgagattataatgaggggaagcaacttcacaactataaaaatcatcctaaattatgttatgagcattataataattatggatttatttattcatctaatccaccaaatgcagcttaggccctattcagactaattagtcaatatactgtgcaactcaaccttcagtgtcatatgatttaatttccctttgcttcttgcaacattataattatgtgctttgagtttaccgtaactaatattagtggttttccccacatgctcacaaactaaaggaagagacaaaaagctttttgatcacctaataagtacccttaggagaaaaaaaatttgctaatatggagacaagaatttttggtttttttatgtgtgtgtgttttttttttttgcatgagatgaaacaaattccttgtatgattttaattacatcctaatacttcataaacatcttttaaaactcaataaaataccaattgtgaatagttcagcagctcccaatgatgggatggcactaacctttataatcaagtccatggtcccccaaactggccactttttaaaatcaaataaatcagtagcaaaacaatagctctttttaacgtaacgcaagattgtttacagagtttgggagtttggttttttgttttgcctttgttagtactatgcttattatttgctttccaaccaaaaaatattaccaaattatttccagttatcaaaatttagtagctattttaaatggctttttggtttggttccccaaaggcctgggtgaagaacacatctgtggtagatacaatcatctctgctacttaaaaagctccaaatgtacaaaatgtatgaaacttccaggctctagaaggctttcttgcaaacaggaaacctcagccacagggagaaaaccaacttccattttgagagcccaaaatccaagaagttattctcttgctgccagctacccatttccactgattccagtaagtccatcttattagtctgctgctgatcaatactgttagtaatttaatgcagtaataaaatttttttctttttcctatttgtaagaagaaaggaagaagagaaaaataattgaacttcccacacacactgactcagtatcatcccaagataaaaatgcatccaccatgtcaaagaaggttaacttctgggttctttggaaattgtgatggttgtttctcagaatcaacatgtactgaaaaaatcaaatttagtgttaactcaatataacatacagacgaactatttattttcaaatgacagttgtccaggtcaataaatgtccttttttttttttttttttttttttttttttttttgagagagtgtcttgctctgttgcccaggctagaatgcagtggcatgatcttggctcactgcaacctctgcttcctgggttcaagctgttctcctgcctcagcctcccgagtagcaggaactataggcacctgacaccatgcctggctaattcttgtatttttagtagagacggggttttcccatgttggccaggctggtctcgaactcctgacctcaaatgatctgcctgctttggtttctaaatgtgatttttaatcatccattgtatccaagggaaaaaagtctcaaatgtctattaccttcaataatgccattgagtattatctctctaatcactcttcctattcttcaacctcctgacattctgatacaagctacaagctttctgcgtcttgttttaaatgaattatttcttaagcctcaatttaaaaaggggtagaggggggcactctgagaggtatttcagagctcaccataacaacaccccagaaaggggcaagcaaaaggcattcaattctaccatgagcttcctaatgaatattcttgaaggctcttataaaaccgcattcattttctaagtgactgatatccttatagaaatttcccatcttttctttttccttttattcccaatccacctacccacttaaatgcattctatacattttataaaacttctatacacttaaaaatgttctggaattatacatatgtatcttatgtcacaaggaaagaaaaatgatttattttgcaactttgtgaccctctgtaagatgtactctagttaaacaaaaaagaagataaaaatgcaaggtatacatttgtgtactaacttgtacacattttagaagcaaagttgatggatatcagtcacctattgacaagatgatttggagtctaaaccatctaacttgtccccttcttcatcatttctgatcctctctctctcccagccgctcaacagagttcttttctcaccctgccactacacaaacttcagagttgacttgtaccctcttaatgcctaaccccaaaagctttttctgcatatttatttacaactgtaaatacattgcaatcctttcagttatgaaacaagatcccttctatctctggcttccaaatcacaagtgtccttttctcttccctcattctttctctcttttctatccccttcaaaggatactctttttctagcaatggggttaaaaataatagtcagaatctctgctctcctagagtttatgccctgcttaagggagacaaacaataataacaagtaaatacagaataaatcaagaagggttaaatagaaacataaaccagagtaggagggcaggaaaaggagtaaaattttaggtagggtggacagggaaagcttctttgagaaaatgacatgtgagcagatctggccttttagctgaatcctgcatatggaagtaccataaatcatggaagacaaccccaaggtctcaactcccctctcaaagtctagtcccacatacggctactgactatcatgtctacaaatacctctataccaacatggtcaaaaccaatgccattctctctacatgtccaatgtttcaaatatgacattcctataatttcttattggcatgtaattccatgtccttcagaatctaaactccagctattcaaatgcctctttccccacatctgtcacattttatcagctataaagccccagagattctctttgagagtctttagtacatgaccctcctttctatccaatctagttctatttctctaattgccactgcctacaaattagtacctcatctccaaggtctccttcctccaatccatcccacatcttagaataaaactgtatttactgagtatagctccgttccaagatggccaaacaggaacagctctggtatgcagctcccagcgtgatctatgcaaagacggatgatttctgcatttccaactgaggaacctggttcatctcattgggactactcagaaagtgggtgcagaccacggagggagagccaaagcagggtgcggcatcgcctcatccaggaagcgcaaggggtcagaggatttccctttcctagccaagggaagccatgacagatgccatctccatcaagctaccaatgactttcttcacagatttggaaaagactattttaaagttcatatggaaccaaaaaagagcctgcattgccaagacaatcctaagcaaaaagaacaaagctggaggcatcacactacctgacttcaaactatactacagtaaccaaaacagcatggtactggtgccaaaacagatataccgaccaacggaacagaacaggggactcagaaataacaccatgcatctacaaccatctcatctttgacaaacctgacaaaaacaagaaatggggaaaggattccctatttaataaacggtgctgggaaaactggctagccttatgtagaaagctgaaactggatcccctctttacaccttatacaaaaattaatttgagatggattaaagacttaaatgttagacctgaaaccataaaaaccctagaagaaaacctaggcaataccattcaggacataggcgtgggcaaagacttcatgactaaaacaccaaaagcaatcgcaacaaaagccaaaattgacaaatgggatctaattcgactaaagagcttctgcacagcaaaagaaactaccatcagagtgaacaggcaacctacagaatgggagaaaatttttgcaatctatccatctaacaaagggctaatatccagaatctacaaagaacttaaacaaatttacaagaaaaaatcaaacaaccccatcaaaaagtgggcaaagaatatgaacagacagttttcaaaagaagacgtttatgcagccagcagacacatgaaaaaatgctcatcatcactgctcatcagagaaatacaaatcaaaaccacaatgagataccatctcacaccagttagaacagcgatcattaaaaagtcaggaaacaacagttgttggagaggatgtggagaaataggaacgcttttacactgttggtgggagtgtaaattagttcaaccattgtggaagacagtgtggcgattcctcaaggatctagaactagaaagaccatttgacccagccatcccattactgggtatataaaccaaaggattatagaaacatgctactataaagacacatgcacacatacgtttatttcagaactattcacaatagcaaagatttggaaccaacccaaacatccatcaatgatagactggattaagaaaatgtggcacatatacaccatggaatactatgcagccataaaaaaggatgagttcatgtcctttgtagtgacatggatgaagctggaaaccatcattctcagcaaactattgcaaggacaaaaaaccaaacaccgcatgttctcactcataggtgggaactgaacaatgagaacacatggacacaggaagtggaacatcacacaccggggcctgttgtggggtggggggatgggggagggatagcattaggagaaatacctcatgtaaatgacgagttaatgggtgcagcaaaccaacatggcacatgtatacatatgtaacaaacctgcacattgtgcacatgtaccctagaacttaaagtataataataataatatatcttaaaaaaactctattgccaaaagccttatgtggctgtccactacattaagaaaaattgcttgtttgtttgtttgtttttccagttgtaattataccattctcttgactatattctgtctacctcttaaattagataacttgctgatcataaaacaaaccccaagattttccctcctgaagacacttcattcatgactctttccttaatctaccagatatgacaccttcctctgcttcttttgaactcttcagccctttcctacttcaccacattaagagtttaactatgggccaggcatggtggctcacaactgtaatcccagcattttgggaggtaaaagcaggaggattactggagcccaggagttcaagatcagcctgggcaacatagtgagaccctgtctccatagaaaaattaaaaatttagctggatgtggtggtaagtgcctgtaatcctagctacttaggaggctgaggcgcaaggaccgctagagcccaggggggttgtaagttacagggagctatgatcgtgctactgcactccagcctgcatgacagagggagactcagtcttgaaaagaaataaaaataaaaaaggattttaactgttaaggttttgatatttttatttcaatagttttggggtttggaatggttttgggtttcaatggttttgagttacatgaatacattctttaagtggttatttctgatattttagtgaacctgtcacctgagcggtatatactgtgcccaatatgtagtcttttatccctcactcccctcccaatcttctcctatgagtcctcaaagtccattatatcactcttatgcctttgtgtcctcacagcttaactcccacttataagtgagaacatatgatatttggttttctattcttgagtgacttcacttagaataatggcctccagccccatccaagtttctgtaaaagacattatttcattcctttttatggttgaatagtattccatggtgtgtatataccatattttctttatccactcgttagtcaatgggtactaaggttggttccatatgtttgcaattataaattgtgctcctataaacttgtatgtgcatgtgtctttttcttataatgacttcatttcctttgggtagctactcagtagtgggactgctggatcaaatggtagatctatttttagatctttaaggaatcttcatactgttttccataatgattgcacaaattcacatttctaccagcagtgtaaaagtgttctctttacattacatccatgccaacatttattgttttttgacttttaaattatggtcattcttgtaggcatagggtggtaactcactgtggttttaatttgcatttccctaatgattagtgatattgagcatttttttcatgtttgttggcagtatatcttctttggagaaatgtctactcatgttcttggtctactttttgataggatttttttttcttgatttgtttgaaaaagaatatatgtaacacataatttgtcaaacacataaatagaacaaacatccattaattcactaaacaacttggaaaagtaatccctaccaacattgttgagacttcccaaatcctcccttccagagaaaactactaccctgaattacttcttaataacttctttctctcctttatagttttaatatatatgtatgtataattaatgtttgattttgctaagatatcttaatggtggcatactgactgcattcctttgcaaactgcattttctaacttaagtatcatgattttaaggttcattcatgctgatgggtacagttgcaaggcatccatttttactgccatatggtattctgttggtggacattacagttctttccatcatttaaaataagtgctatagatattcttgtgcatgtcatctggtacatacatagaaatacaggaccagagtttctgggttttgggcaggcacatgttccacttttcatgaaaattgaaatgaatgaatatttttccaaaatgattgtccctatttaaaaacatcaatatttaaaacacacatttcatattttctatctagtaattctaatatctaaagtctttggtaggccaggcatggtggctcatgcctgtaatcccagcactttgggaggccgaggttgggggatcacctgaggtcaggagtttgagaccagcctggccaacatggtgaaaccccatctctaccaaaaatataaaaaattagctgggcatggtggcggatgcttgtaatctcagctacttgggaggctgaggcaggagaatcacttgaaccctggaggcggagactgcagtgtgctgagatcatgccattgcactccagcctgggtgacagagcaagactccatctcaaaaacaaaacaaaacaaaaaaaactatattgactaacacggtgaaaccccgtctctactaaaaatacaaaaaattagctgggcaaggtggcagacacttgtaatcccagctacttgggaggctgagggaggagaatcacttgaatccaggaggcggagactgcagtgtgccgagatcacgccactgtactccagcctgggcaacaggagtgaaactccatctcaaataaataaataaacaaacaaacaaataaataaagtctttggtagtctggttaaagtttctgttgacctacatgctctctctcatggtaactctcttttacgtgttttactttattttatccttctattttagattcatatatgagatttctttgagatctgagctgacagtgtactccttcagaaaggatcttcacttatttctcccaaactcctgggagtttcatacatctaggactaccttacacaaaaattttcatccattcatttgaaagtgtgatttttgcctttttaaatattttgtctagcatttttagattatttgtagtcagaagattccaggatctccatttcacaaaattgcccagaatgcaagttcctatatttcctgaactttagtacagtgcttattcaccttatattttatttactgtgcatttgtttttttcttttccgctggaatgcaagtttttttgatagcaaggctgttttatttatctgtgaatctctcatagtaaccagcaaagtatcttgtatatgcatagctgtcaatgaataattgttaaataaaaagataaataaaattctgaaaatataaagcctagagcccaagaattagtggcaaatattgcccaaagagatacgcttaatttatattttccttattttgcagtttggacatgtgagtataaccagctaaatatcacagcatttataacagtgaaggagaaacatctttgatttttctaatagacaaaaaagaatacattttcttaggaatccctcaagctccagatggctacaaagaaaaaagattttagtgtttgaaaaagagaaatatgcttatcaaatatgaagcaaagtcttataaaaacacaatgccctggaaaagagaacattatattttttaaatattctaaatcattaagaaattcatgaaatgatgatcacagaggctaaatgtgtaattacagggtacttttgttcttcctatgacagctactgttcacataaaatattaattgaatataacttctctatttggcagaaaagcataagaggggactccatctcaattgtcgacagcactctacaattgacagtgatcctctaatgtcaatgacagtgtaagaacatctccccaaaagaatgaagtaaaatatagagcaaaaatcactttttaaaatcgtaatactatattccacatggaattttccaacaatagtcacaaagattgtaggtttataagactagtagcttagttcagaaattcaaagaaaaaaaagaagtcattttcacagataacattttatcaatcattatatttagtaataaacagaaaccaactaaaaaaaaatgtaccatgatattagtcgttaagtactgagcaggaatctataatgctgccccacagttcacataccacacatacagccaaggtttgcatcaaaaagaataattcacaaaaccaagttggtttaaaaataaccatgaagaggaaaagtcacatctgaatcactgaaagaggttttatatgtgtatatgtgtgtaatcttttaaaaagaacaactaaaaaggaaactacttatttcttcccccacttaactaagcattcagtctataatcagctggttagcatgaagtattattaaggcactatttttacagtacccatttttatgagttttgtatgttacatgaagagtggttttcaaagaaatgtgcagactggttattctcttttatgcttccaatattaagtcaaaccaaagccctgatcttggcataaggtaatgcaagtggaaacaaaaacatttcaatctctgaaatgcctttcaattttcctccatttggtctatcacattaaagtcttgtttatcaaaaatagatttaaacaaaccctacacttaagatggtggcggagttttttcaaattgcagtaagagaaaaaaatctttattttagtaagttactagctactttaggaaaaatacataaaaacaaattattagacccataagcaataatggttgagcctagttataatgatttaaaattcacagtctggaaccgcaattatttttgcaccaacctaataggtgtccactcaaggaaaatcattacacaaaaaactgcactcgtatgtgtaccacagcactattcacaatagcaaagacatggaatcaactgaagtgtccatcaacagatgactaaagaaaatatgatacacacacacacacacacacacacacacgaatactattcagccacaaaaaagaatgaaatcatgtcttctgaagcaacatggatggagctggaggccattatcttaactgaaataactcacaaacaggaagtcaaataccaaatgttctcacttatagatgggagctaaataatgtgtacacatggacatagagtctacaatagtagacagtggagactcaaaagggtgggagagtcagggaatgagggatgagaaattacgtaatgggtacaatgtacattattcaggtgatggttacactgaaagcccagacttcaccactacacaatacatccatgtagcaaaactgcacttgaaccccttaaatttttaccaaaaaaaagtgaacttaggttaattgtaaatgtatgttccaaactctagagcaaccactaaaaaaaataacttacatgctaaaaaagagaggaaatgaaatcatataaaatgtttagttaaaagaatatagagaagtaagcacttatatgcagtaaaatgatacagacaaaaattacagacaaatctctttcagtagaggaatgaataaattatggaaccatgaaatatttggctataaaactatatatactgatatattaagagcattaagctatgttaagtggaaagcatattgcaaaacaatacattaaaaatctcttctatataatttttaaaatgatggaagaaagaaagaaaagggaggatggcaggaaaggagtgagggaaagccataaatatacataccaatctgttagcagtggttctttctggcaggagaaatgagactcagaatgaatgaaaaggggttattgaacttaattgtcatatacaatttttctacacatgcattgtaatgagaatcactagatattttatacaaatatttttttaaaaagaaaaaacaaaggaagcaaaaagggaagaatattgtggtttccacaaaaccaagaaagtggttgctagcttacctccatcattggctgaaaggatttcaaccaaatcatttcaaatagaaacttgagatccaccattaatagttttaatttataatttcatttaatggctaatttgatttacaacttttttttttttttttgagacagagtttttgctctattgcccaggctggagtgcagtagcacaatattggctcactgcaatctctgcctcccatgttcaagcgattctcctacctcagcctcccaagttcaagagattcccctgccttagcctcccaagtagctgggattacaggcgctggccaccacgcccagctaatatttgtatttttagtagagacaaggtttcaccatgttggccaggttgatctcgaactccgtgacctcatgtgatccacccacctcagcctcccgaagtgctaggattacaggccacggcattcagcctacaactattcttcatacaagtagtttagtttggcttgtgaactaaaccaaggatcaaatataattttggagctggaaggaattttagaaaccatccgtatttgccccctccttttacatatgaggaaattaagaataaagagatttgtcctaaaacagacaactaattacaccaccagtgtgttaaaagagaaaaaaactcaacctccttgcttctagtctagtcctctggtaattcaatttatttccttccatttaccttgtaaatatcatctgtgcttcctaagtagttcctgaaaattttcctttttcaatcccatttccaaattatctgcctgaaaagaatttcacatttatgtgctgaatccagaagatacgacatagacagtagcatggcaaaagcatttagaaactgcctcttatctagcatttttgcttttattcttaataaaactgctgaagcaacttgtttaaccaatgagacggacacaaagttgagagtggaaacaactgtcttgactcccagaacattgttcttctgtatttcataccattttacattttttattttttaaataaaaggcagtgttttcttgcacaacaaacacccactggttaacaagatgacttttggaagtcactgaactcttgcaaactaagtttcagctattaaaggaacagggtccattaggtgagctcagacatttcttgctcctttccacgagtctggaatttctaagatggggctcaatatgtattaggtaatggatcccagtggcaagatgaaatactgcagatcaactccgtgaacagttttatagagttatacgaagcaacagaaaagagcagagttcaggaactccttagcataaacccaaacttggggaagtagaactagctaatctgtagttttagactcagtaaagtacttgggatcattctcaacaaccataaagttaccatgtgccataattacacatccatcacagggttcctagaaagtgaatgtttttattttttaacttttaatttttgtgggtacacagtaggtatacgtatttatgaggtacctgagatgttttgatacaggaatgcaatgtgaaataatcacaccatcaactatagggtatccatccctcaagcatttgtcctttgtgtttcagatgatccaattacactcttttagttattttaaaatgtataattaaattattattggccatagtcaccctgttgtgccatcaaatagtagggtcttattcattctttcttatttttttgtacctgttaagcatccccacctcccgccaagtcctccactaccttccatgagttcaattgttttgatttttagatcctacaaataagtgagaacatgtgatatttgtctttctgtgcctggcttatttcacttaacataatgatctcccccagttccatccatgttgttgcaaatgacaagatctcattcttttttatgtctgcatagtactccattgtgtatatgtgccacgttttctttattcattcatctgctggacacttaggttgcttccaaatcttggctattgtgaacgctgccacaacaaacatgggagtgcaaatatctcttcaatatactgcttcccttcttttggggatatacatagcagtgggattgctggatcacatggtagctctatttttagatttttgaggaacctccaaactgttctccatagtggttgtactaatttacattcccaccaacagtgtaccagcattctcttttctctgcatcttcaccagagtttgctattgcctatcttttggatataagtcattttaactggggtgagataacatctcattgtagttttgatttgcatttctctgataagcaataatgttgagcgctttttcatatgcctgtttgcaatttttatgtcttcatttgagaaatgtctgttcaaatcttttgcccattttttgatcagattattagattttttcctatagggttgtttgggctccttatatattctggttattaatcccttgtcagatggatagtttgcaaattatcttctcccattctttgggttgtctcttcactttgttgttccctttgctatggagaagctttttaacttgatataatctcttctgtccatttttgctttggttgcctgcacttgcagggtattagtcaagaaatttttcccagaccaatgtcctagagattttccccagtgctttcttgtagtagtttcatagattggggtcttagatttaagtctttagtctgttttgatttgatttttgtatatggtgagagacaggagtctagtttcattcttctgcatatggatatccagttttcccagcaccatttgttgaagagagttttccagagcgtatgttcttgacaactttgtggaacgtgagttcattgtaggtgtgtggatttgtttctgggttctatattctgttccattggtctatgtgtctgtttttatgccagtcccatgccattttggttactataatataatctgaagttatataatgtgattcctccatttttgttctttttgcttaggacagctttggctattctgggtcttttgcgagtccacataaattttagggttgttttttctatttcagaagaatgtcatttgtattttgatagggattgcattgaatctttggactgctttgggtactatggacattttaacaatattgattcttccaatccatacacatgaagtatttttccatttttttgttgtcctcttcaattttgtttcatcagtgttttatagttttagttacagagatctttctaagtagtgaacttttgatgagcatctagttttctactcttactattccttctcattaacattctgagaatgcatctaataactcataacaattacgtaaatcacatatgctattaagccgatgaatttggttttcttttaaaacagcattcaacaacagtaattgttaaaacaaaataacaataaaacctaagtctgattctaatacatttgaggaaatagtacatgaatataatcaacctttttctgaaaaatcactagagatagaccttaaatgcctattcatgactcatttctcagcacacattttgccactggtcaattcttattaacatattaacatatggttatgtatttattctactatatgagagccttgtcagtgtcttacagcttggggattagcttagttatatggaagatttcatgtggtactatctactgtggtggaatttcttttcacaatcagtattaactgtggttcttttcctctgctagaccctagaggtaggtctagaaatacaaatggagtacctgactcatagtgcttatagaagtgaaataatccatatttagaagatgtaatcttcttaatgttatacttactgataaacttgttttgcatagtctccaacagggcttggtgagcatcctcagcttgtaaagcatgtgaacattctctagccagtatggtgcgcacaagatgctctccacatcctagaaatccaaagaaaccaacagttgaggaaaagcagcaccgaacaccctgcttatttcaatagcattagaacacccttatgcatcatttaagagagtagttagctgggaaaataattccgtgagggatgaaatgacttccatgagcaatctggtaattttagtaaagagattcagcagaaactaaacacaaagtttatcaatcaaaagcaaaccaatacaaattaatatgatacgtagttctctgtttaactagtatgtgttgactggtgttaggcactaacaaaaaaaatccccctaaaaaatattatgtgtaattgttaaaccacattggtacttttcaatatacactcattgccacaaataccatcagttcataaaagtgtgaatttttcaggacataggcatgggcaaggacttcatgtctaaaacaccaaaagcaatggcaacaaaagccaaaattgacaaatgggatctaattaaactaaagagcttctgcacagcaaaagaaactaccatcagagtgaacaggcaacctacagaatgggagaaaatttttgcaatgtactcatctgacaaagggctaatatccagaatctacaatgaactcaaacaaatttacaagaaaaaaacaaacaaccccatcaaaaagtgggcaaaggatatgcaagaacacttctcaaaagaagacatttatgcagccaacaaacatgcaaaaatgcttatcatcactggtcatcagagaaatgcaaatcaaaaccacaatgagataccatctcacaccagatagaaatgcaatcattaaaaagtcaagaaacaacagatgctggaaaggatgtggagaaacaggaacacttgtacactgttggtgggagtgtaaattagttcaaccattatggaagatagtctggtgattcctcaaggatctagaactgaaaatgccatttgacccagcaatcccattactaggtatatattccaaggattataaatcattctactataaagacacatgcacccgtatgtttctagcagcactcttcacaatagcaaagacttggaaccaacccaaacgtccatcaatgacagactggataaagaaaatgtggcacataggccgggcacagtggctcacgcctgtaatcccaacactttgggaggccgaggtgggtggacccacctgaggtcaggagcttgagaccagcctggccaacatggtgaaaccccatctctactaaaaaatacaaaaattagccaggtgtagtggcaggtgccttaatcccagctacttgggagggagaggcaagagaatcatttgaacctggtaggcggagtttgctgtgagctgagatcgagccattgcactcaagcctgggggacaagaacaagatttctcaaaaaaaaaaaaaaaaaagaaagaaagaaaatgtagcatgtatacaccatggaatactacgcagccataaaaacggatgagttcatgtcctttgcagggacgtggatgaagctggaaaccatcattctcagcaaactaacacaggaacagaaaactaagcactgcatgttctcactcataagtgggagttgaacaatgagaacacatggacacagggaggggaacatcacacaccagggcctgtcaggaggtggggggcaaagggaaggatagtattaggagaaatacctaatgtaagtgatgggttgatgggtggagcaaaccaccatggcacatgtatacctatgtaacaaaactgcacgttctgcacatgtatcccaaaacttaaagtataataaaaaataatagaataaaaagaacaggagccattaggaccttcaaggaaaaaaatgccctcttcaaccagaaacaaatatgctgaataggtaaaacactgcctttgactattacattagtcatagcagattagaaatatgtcatattataaatagtcaattagaaataagattacattcctctccagtgttggaaatggatgttttaagaaaattattcagcaagactggaaaatgagaggaaagaaaaagaatcaatagaagaatgggaattctgaagtagttgttcacctattcagtaaaaaaataaacacaggccttctaaaagagaaaaaaaaggatgaattttttttagaaattgccagatatttcccagaaatggcttccctgtatttttggtaaagcgtaaatgcaaacatccttcaggatctaaatatctctttgtgaatgaatacctacacttcaaggaagatctagatacataagtcaatgtgtaactttgtggcattccctattcagtaaatttttgcaatattgtttttataatcgggaaaaagatgacaataaagctaacagaaagaaatcacgttggacacttactaagaacaaccattgtgcttagctcatgaaacgccataaagtttaattccctttgtgtacatacttgatgttgaacagtgaaatgttacactttaggacaataataactgctagaaaattggcatattataaactaaatgaatgttcagaaggttatatacacatgcctgaagtcaaaaagctaaaccacatgaagttaacattacatgaaaactacacaatgtatgtcagaaagactttgctctgctgttatacaggaatatatatacagagctttccaatgattgatctttttaccaagaaacttttaaaattatgacttatactctctgacattgatcatctttaacaaagagccatgaaaccaaagcttattctcctgtaggttccaatcaaagaaagtttgacttatgtgctcttacctacaaaattccaaggtttcttagaatatgctgccatagagctgaagtgtgattcaaaggcaaacagttccactctttattcaccaaaaaataagactttcactataccctctttttgtccttacttttccaagtaagagtatgtgtatgttctcacatcttagcagaaaacatggattataaaagacctgacaagattcctagaagtaaaaaataccaagttctaaaaaaagaaaaatttagcatcaataagtatgacaaatgaatggattaaaacacataataaattcataacttatgtttttaaaagcactaatcacctttggaggatgctatgaaaccaactcactattctgaaaattgataaaagaaaacaagcaagcatgtttctgtccttccaatagggactacataccagagtaacccaacaatttatgaaggaatattttctctacagaagtatcccagataataaatgaaaaagaaattaatagaattggaatataaccatttgtaacccacaatgtaataactgatagaggcaatcatcagtggctgctaataccacagaaagataccagacactatgtatctcttgacaaaatcataccgacgtagtcttgtccactgcccaaaaaaaactgtacttgaatccgattaggcctctaaattcagttatcaatttccagaaataaagaacatctgcaaaaagacctacagttgcatcatacttaatgatgaaacgctgaattgtttctccctaggatcagaaacagggcaatgatgtctgctttcatcacttctcttcaacaatgtactggagatttcagccattgtaataaggcaaggggaaaaaaggcataaagaacagaaaggaagaagtaaaactgtctctattcacagatgatataattttctacgtagaaaatcccaaaggatctacaaaacaactattagaggtatctctccatattcttcctgtctggttagtctaggacaaaggctggcagaagatacctgcctggtacttaccagtcctcaaaatatggacctgaccttcatttctttccccattcattcacttgccaggctgttattgagtccctactctgtggtaggcccagcgtacacagcagttggcaggggtgctactacatattgtcagacctccccaacagtgtcaggcccctgcctgatgactcagtattcacttaactgtcattctggccagtccagatgtcaatgccctgattgtgtattctacacaccaacctcaaggattcatataaaaaccctggattcagcagcaggaatcctggacattcccacggccctaggagtgccagtctctacggccaggtcatctcacattaatcctaacccttactccagccccagctctctctttcccagtatgtttcctgttgctgagaattcagcatgtcccatgctcaaagataatacatgtcttctacttgtgggtatcccgaaactttcaaaacccacactgaagatgaactaccaataaaaaattccaacccccaacttcaacacacatatacatacaaccaaaaggaagaatgagcaatagcaaaaaacaaaaaaattatttcaagaagtgaaaataattggacagcagttgaaaacaaatttgtaaaaggccaaatagtaaatattttaggctttgaatgctacatgtaatttctttctataaaatcttcttaatgttttttgcaacaagtcttaaaaactaaaaaatcattcttagcttatgagctatacaaaaacaggccatgaaccagatttggcccacaggtcattgtttgcctatccctgaaatagagcaaactgtagtacaataagaaaaagaaacagagcctagaatgataaagagaaagaaaatgaggagttaagagtccaaaagtgtaaaatgataatgtccaatgcattaataggcattttgaaagagaggaaagaaagaagaaagcactaatatttgcataaggaataagaattttctagaatttaagttattaaactgaagatccacagagttccaaaaaagaggaataaaaatagaaatccatccttaattgtaacagtttgaagctctggaccaaaggcaacaagaaaatattaaaaactcaccaaaaagaaaaggaaaaaaattcacctacaaaaaaattcaaaaatttttaaattaaactgataactaaatatctccaagcaacaaaagaagccgcaagactaatatcttaaagatgctatggcaaaaaaaacaagcaaacagaaaaaaacactgccaacctggaatcagttaaactaccattctactagagtgagggtgaatagagaccgtttcagacatgtaacgacaaattcatttctcagagattttaactcccagctcacttttactctgcccaacactactccttgtcatcattcttgctgaatttaatatttatctagatgattctcccgatatcttggcttttgctattctgatatcctctcctccagttatccacactacctgataaactcacacccatttcagcagtaacgtgaactcctcagtcacatcaattggaatcatctcattcctatctttccagctccctcccttgagcactccaactccaacattccctccatctcaccaaaaactgccatccattaattctgctgccttttaactattcctcaccccactcaggtcctcacctctattcttaactaactaaaattccatgcttcatcaacttacatccatccccttactcccaaaaacctccctgctgctctcacttcatcaaacatgcctggcaaaagcccaccctggagtaacagtcagaatagctatactgggctgcaaaaacaacgtccaaatctcagtgacttaaaatataattctcactaatgttataggtcatacctgcatcacctgaagatctgcttcacacactcactcaaacctaggtgaaaggaacaaacctaggcagatggagactccatcacctgtaaatgcactacctgaatcacatacttcccctccacaagaacgaggccaccctgctgttccagaaggctgttttaccaccttagcctgaaagtgacaaatatcattaccattccggtccctggccagaaagagctacacattcttaggcaactacaaggggcctgtgaaatataggggaatatatggatcttcagagagcattaagttgaatgtctctgccatatctgactaaatccaactttccatgcctgcacttgcatagctaagcctgaggcacagcagcatgactgaggggtgacatgcatgagcatcaaggaccatccatggccactgagtgggaaaaattaaaaaaaaagagaaaagaaaagaaaaaagaaagaaaacaccatctgctgaggacggcaggagggaaaggacagacctgaaaaccaaagggtactgctaggtagcccgactagacccagtctcttcccaggcatctgttacacgaggttttctaatttaagtttaaatttaaaaacctgccgctttagcaacgcaattcagttctcttttttaaggctacatccattcctatcataaataatataaaattaccatttaaccatttttaaagtatgcaattcagtggcattaagtacattcacactgttgtacaaccatcagcaccatctagctccagaactttttcatattcccaaatggatactctatgtatgtatataccatatgttctttattcattcatctgtcaatgaatatatgggaccaaatgcattcttaaactatatacgtggctctttgctggtgattgaaaatggctcagaaaactttacactgaaagaagacgacttctagctactttttccaattcaaacatgcaactctgtgttgattcaaacataatttctgataagctcatatacacatatttatcagatgccattagcagcaatacacgaaaaagatcatttgatctgagaatatttattttaactgacttttttaggggggaaacccaggatatatttaattacttccaactacagaatttcgttttagttcatttgaataaaaaaaaaatactttaatacttcatattgtctgaaaaatggagtcctgcatattttaaaaccaccttttatccatctaaagaatgaccacttccctcaatcatgtgacaccacttcagtgaagccacctttaaatcatctgtttttgaatttgtctggaatccagaaaaagttggcaaaaccccaaggaaactagaagagttaattaataaagtatctttattttcctgtcatctaaatccttccaacaatgccattatttctctagtggatacattagcttacattacaaaaagcttctgtaactttacccataggagaaatctgatatttctgtgtcaagaagcagggtcttttttaagaagaggacagcttgcacattttatttactctattcattcattctcattttctctcctccttccctccctcacccctcccaccctcttacacacacacccctaccttaaggcctatagggtaagggttagtatctgttctgcagtgagactcatgtttgaatccagcagggtgactttgggttatttagggctcagtttccatagctgtaaaatggggaatgggataccaactacctcacagggttgttttgaggacaaaatgagaaaaatcacataaagcatttagcatggagttgaccatagagtaagcacttaataaatactactatgatgaaaataaccatcttaagaaaaattttctactactttgctgcctctcatcctattctctgtatgttccttctattaaagtgattctcagctagcttaacaatcatcactgagagagcctaaaatagaatttaaaagtttatcctttgccttgtaattctaaatgaaggctactgcttcaaatcaagctaagcctttacatagggtaaaaatgaccacctaggtaaacctatcattatcaaaacaaaacaaatagtatggtaaagatttctcttagcctggcaggaaacattttaacttgattatctagagactgtggatcatgcttgacttttcttatttattccttttattttccccagtatctaaaataaaacctatttttattctccaacaggtttattgcccgacttaagattacactcctgcgttcacaatactttctcttaaggcaagttagtaaaggggaaagcaaagtttcccatgatgggatttggccccattcacttcacttccctgtatcttgagtacacgagttgatcagagtgaacatgaacagatgccatgggtgttttatgttgcctgaccttcatcacacatttataattgtttttaacttcagctccagtgatagatgcagcctttaaaacaagataattaaatatagggattgtgacagcccaacaaaatcatattgtcaaattaagttttagttccaaaaggtaaaagtaacaaactgaaaagcttttgcaataagaatagagaaacatcaaaatttaccaattcttggctaacatgtaagatatatcttcattgcatttctagattattttcaatcttttttgtcttcatctaatgtagtagtagcagcagtggtgggatgagccccattattacaaaatgaaaattaaaagacctttatgtgtccagttattaatgtagtgttctaatggttgaggacaataatataattgctccacaggacctcaaaataagattaggattttaaaatataactcataatctcacagatctttcttatctgtgcagactttttgtcttctaaaccactcccacctcaattctaatacaaagagccccagaggggaaaaagtgaagttgcattcacagcagagacacaacccacattcctaggcagcctcctacaaaagcacaggctcgacagcaacaaaagctcacattcagtacccctggcacaccacacgtctccaaggattactgatgattttgaagtatttatgtcatcttataaatgctgccattcactctcactgtggctagtgggcatctgaaaaatctttcaacacatcccctcttagaagtccacagggatagataactaataagaaagggcctttccaaatttaaaaggaaacatttggtacttcagtttccagtattgcaacatctctttttcaacaaaggaatttattacacagtacgtcaccttttccctgtcaaaggatttactgccaattttggagttgggttacttctggttttcaagcctgtcttgtgaaattaaagagagagctaccttaaaagtgataggacacacatgatttcagtcttcacagtgtccctatggttatcaaacctggaacctattatatacaaggggaaaacataaggagcttcataaagagatggaataagtggtgaagatgtctaatccagtcacatcttaaggttatagctcaccgacacatatttagcgtttcccaaatattcagagttctctgtaatccacaacttgtctcatactttggttatttattgtaatgtatcaaaaacaactcaggcttttcaattttttctgtgataaataataaccaaaagaaaaaccaattttataattatctcctagagatatcatctcttacaaagtagggtgtgattgatatatgcgttagcatttcataattatttttaatatagagaaatattatcacagttatgattaaacacagatatctagagcacggtgctagacatatagtacatatactaagtgctttatacatatattagtttttatcactactgccaattttattgaggatataaccaaatcacacactcatacgaaaaatcccaactgtctaaataagtagctccataaataggaaaggttccagttttatgaacgcaaatactttcacagattaaaacctttttgaaaaaaactaaaaccaaaaaaacaaacaaacaaaaaaaccttcaacaaacatgagtagtgaaaacgcttcatcccgtctaccatgtcagaggaagtgtgtaattgacaaagcttcagccactctcttttccttgctcttctgggtgtgtctgtgagggtgctgccagaggagactgacatttgagtcagtggattaggagaggaagacccaccctcaatgtgggtaggtgctatccaactggctgccagcacagcaaagacaaagcagggggaagaaggtgggataactttgtttgctgggtcttctggcttttccctttcctatactggatgcttcctcctgctcctcctgcccttggacatcatacttcaggttcttcagcctttggattcctgcacttacaccattggtttgctgggggctcttgggcctttggccacagactgaagggtgcactgtcagcttccctggttttgaggctttcggactcagactgagccactactggattctttcttccccagcttgcagatggtctatcctgggacttcaccttgtaatcaggtaagccagttctccctaataaactccctttcatatacataaatatcctataagttctgtccctctggagaaccctaatacacatctcaatgtagaaatttacccaatattcattttgagtgttaatacaggagataaagcagaaccttgctttctgttctaaattatttaaatttagttacctaaattataacactctaattagagcatcagggacaaatgaacccagggaaggaggaaaaaaaatcagaggcaaccatcaccagtaaaagtggtattcttatctatggtggtgctgctaagattgtatcactatattgtatttatctgggaaacagagtatatgtataagcattagatttatccacacctgagaacttcattaggaaagtagccataaaagaagcaacactgtttgtaatgttcagttgatgctcttgtcaatcttctatctggattcctgttccatcagagagaaggatcacatatgaggagaaccagctctggctgtagaacctgaaatgagtcacttatgacatctatgcttcagcttcctcatttgaaaaactaaatggcttagctttaatagttttatattcctcacaagacaaaatatttaccactgaatgtagttttagaactttaataacttgctggttaaaatatagttaagaggcttgcaataggcagatgacttgagaaaaccctttttaaaagctgttaattaatgaaaaaatatacttagattaaattcaattatagaaaacttaatttttttagggagaaagggtcactgactcactgactcactgattaaataatcaactactgtatatctggggctttagaattatcttgcaaggaaagtactatcatctcatctgacaaacaagaaaagtgatttggaagaactaagattctaagatccaagtattgtgactcctagtaacatgctcattccataacagtcactgcagaaaccaggctaatatcatcacatgaataaaggagatataaacaaagaaaatccaaagccccaaaaatctgagaatatggacaagatcatagtaataattatctgcaaataaggagcacaacaggttctgatactaacacttaggactgtagatagtctccaattttaaccagaaagtcctataaatagtaagtcaccaagcacatcccaacaaaataaaattaaagattttattttgcctctaagccatggtgtgcatttcatgagccagaaaaaaaaaaccaaagccaaaatgcagttataaacatctacaaatatgcagatgtcatgtaaaatatttcactatacatattgattatatatgtggtataaagtccacaaacagaaagaacataagcaagacagttatactacaccataaatctaacctataactactgagccagccacatatattaaatatttaattaataattttcttaatgacttaaaatttagaagtaatttattggggtcattttgatctctttaaaagctgaaaaggaagtttgagccaatgttatttctcaataaattcctctgtacaaaggagaggcaatataaatcatttcatcagctttaaagctgtacgcaaagtttaaaaacaacattcagtatttagaggccaaataaagtaccatagaaaaaagtcttaaatctgctcaccagtcattgcttatccctttctctattcaatacagtatcaagggaagttttgagggcagggaaagacacactgctctgaaggaggaaggagaaaatagtattcatattttattctctacatctgggtagaatttaaggaatatcaatacagaaattgtccaaaagctgtcttaccaccaactagaaaaattatcagatgaaagtagcagataaaagaagaaaggggcaaaatacaggaaggccacctcaaatgagttaggtaacaaaagacaaatagacaatatacaatttgggactcttcaaggttttcatttgacactattactaagaaataataacaggaaaagaaggaactacatcaacttgtattacttgttaaatttatttatttaatttattttagccagcaagttaacttacagttttattcaaaattacctaagactgtgcttcccaatctctctcaggtcatgagaaaaagatatatcttggactaaaatgtttcatatagtctcaggaaattcacagaatgccccataaaaaccaatacatagattccatagggtctacaaatcccaaattaagaaaccacatggctataattttatttaaaaatctataagcgtatggttttaaacctgtaggctaaggtttcaatttgattttgattttttttttcttccttgaaacagagtcttgctctgtcacccaggctggagtgccctagtgcgatctcagctcactgcaacctctgcttcccgggttcaagccattctcctgcctcagcctcctgaggagctgggattacaggtgcctgccaccacacctggttaatttttgtattttttagtagagacagggttttgccatgttggccaggctggtctcaaactcctgacctcaggtgatccacccgccttggcctcccaaagtgctgggattacaggagtgagccactgcgcccggtctgattttgatttttaatactgctgctggacccatgaactacagtgatactatcatcgcctagaggctaacatgaaaattgcagtaaaaatttggaaactagattattatgttaaaatcacatttcctacttaaaaaaaaaaaaaggaggaggaggatcattggagaaatggctggttctgggtctctgggtctcataaaagatgtattcaagaggagtctgaggcatcttgttctacccaaaaacaagaaaattaccaaagatagtaaagtcaaagatcacagaaaccaacataaaggggctccagtgccaaaagatggacaattttaccagctaaaataatggttctaaatcctctaatatgtctcacaagcctccaaaacagatccctgaaatttccacttctagttaggatgaagaaacttccaagagtccagcactcccactgtaataacaatagcaagccagataagctacagtcatgggttttttaacgaaaatgcacaaatatctcaataaacctaattccaaaaaagataagcctttcctatgagaaaacagagccatggtctcttctattcctaaggaagcagtggaaaaagaataaatgctgtagatgaggacaagaaattagttgaactttaataaacttcaaatgactacatgtgagctaccatgatgcatcagaatcaaaagaaaccccattcactaaacaaggctgaatccattcatcaattctttcctacaggtcttcactaatagctccaaaaatgtagggtagagcaggagagctgaaagatatccacaccctgaggtgcataagttctttggcaagtgaaaagcagcagcattttgaagtctggggacacaacaagagagctgaaggagaagagccaacctggatgcagagagccatcacttactgcaaggcagcagccaccaagcaatgggaaaagtaaaaaagagctgaaagaaatccctcagaagcacactggatcttccctaagtgcactgcaactgtccaccaaagtgtgagaccagagtggtaagacaaaggaagatctcataggtgggtgaaagtaaaaatatccccagtgacccaataagctgaaagctaggctgtaaaagacagaaggcaagagaaagagagaaattcccccttcctaaagctgacagctggtctataaatagataaatagataaagagatatctggagttttgctggtgctcggatcccagcctttgctgaatagtaagacttgacactaccatcagaatatctcaagccagcatatggaaacaaaaaagagcccaaagagacagggcaatcctaagcaaaaagaagaaagctggaggcatcacactatctgactttaaattatactacaaagctacaataaccaaaacagtatggtactggtaaaaaaacagacacatagaccagtggaacagaatagaaaactcagaaataaagccatacacctacaaccatctgaccttcaacaaagctgacaaaaattagcaatgaagaaatgactctgtatttaataattggtgctgggataactggttagccatacacagaagaatgaaattggacccctacctttcaccatatacaaaaattaactcaaggtggatctcaaactataaaaatcctagaagaaaacctaggaaataccatcctggacaacagccttggcaaagaatatatgactaagacctcaaaagcaactgcaataaaaacaaaaattgacaagagggatccaattaaactaaagagcttttgcacagcaaaagaacccatcaacagagtagacagacaatccacacaatgggagaaaatatttgcaaactatgtttctgacaaatgtctaatatcctgaatctataaggaacttaactcaataaactaaaaacaaaaaatcccattaaaaagtaggcaaaggacatgaacaaacactttttcttttcttttgtgtgtgtgtgtgtgtgtgtgtgtgtgtgtgtgtgtgtgtgtgtgtgatggagtctcattttgtcacacaggctggagtgcagtggtgcaatattagttcactgcagcctctgcctcccaggttcaagcgattctaatgcctcagcctcccaagtagctggtactacaggcacccaccaccacgcccagctaatttttgtatttttagtagacatagggtttcaccatgttggccaagctggtcttgaactcctgaccgcctcggcctctcaaagtgctaggattataggcgtgggccaccatgcccagcctgaacaaacacttttcaaaagaagacatacaaatggccaacaaacataccaaaaaaaaaaatgttcaacatcgctactgatcagagaaacacaaatcaaattcacaatgagataccatctcacaccagttagaatggctattataaaaaaggcaaaaaaaaaaaaaaaaaggtgttggcaaagctgtggagaaaagagaacacttatacactgttggtgggaatataaattagttcaaccactgtggaaagcagtttggagatttcttctcaaagaactaaaaacaaaactaccacatgacccagcaatcccattaccaagtatatacccaaaggaaaataaagtatgctacaaaaaaggcacatgcactcatatgttcatcacaggactattcacaatagcaaagacatagaatcaaccgaggtgcatattaatggtggattaaagaaaatgtggtacatatacgccctggaaaatacgtaaatataaaaaagaatgaaaatatgtccttcgcagcaacataaatgtaggtggaagtcatcatcctaagcaaactaacacaaaaacagaaaaccaaataccacatgttcacacctataaatgggagctaaacattgggtatatatggtcataaatatgaaaacaatagacaccagggactactacagggaagattgatggaggggtgcaagggctgaaaaactacctattgggtactacactcactacctgggtgatgagatcagtgtcacacaatatacccatgtaacaaacctgcacacgtaccccctgaatctaaaataaaagctgaaatctctttaaaaaaaaaaaaagaaagaaagagaaaagaaaaggcaacgcaaggcaaagctgttagttacttcacccagtttttgaattttgttgaacagactatgatacttggagcatctgcagccaccttatgaccataaaggggcaagcctgagtaccaaagtcaagagttgaggatggtggagcagaaagacggaaaggaatggagtctttgatgctgaataaaccaaccaccaaccaccgaagcacctttcttgagaatttctcctgtgaaataataatgcttgttatttaagccaaaaaaatgtagtatatataaaccatggaatactatgcagccataaaaaataataaaaatcacaccttttacagtaacatggatgaagctcaatgccattatcctaaatgaaataactcaaaaacagaaaatcaaatactatatgttctctctcataaatgggagctatacaatgagtacacatgaacatacagaaggaaataatagacactgaggacttcaaatgagtggagggtgaaaggaggataagggttgaaaaattacctactgggtagagtgttcacaatttgagtgatggatacactagaagcccaaacctcactattatgtgacatatccatgtaacaaacctgcacacacacaccctggacctataaaaacaaaaatacatatataaatgttttatatgtataaagggctgaaatgttttatatgtataaaacatttatatatgtttatatgtataaagcatctatataaaaatgtgtgtgtgtgtctgtgtatgtgtgtatatatatatatacactcaatttgtcatactagatgcatggaataagaaagactgtaccctttttcagaggcaaatatcttctgcagtctcttctgttttcaaatataatgtttagtatacaatcaataattataagacatatgaaaaagtaagaaatagtgtgactgggaaacaagagaaggaacaggcaacagaagtagactactaatagcccagatgttggaattatcagataaggtttttaaatgaaaaataatttatgtaagtgaaaaaaatattcctaaaagatgggaaactccaacatagaaaacctattaaaataaatcaaaaagaaatacacaaaatgaaaaagtatcacaagtgaaaatgcattcagtgggctttagagcaagcaaaagacagcaaacaaaaggatcattgaacttgatatagtcatgagaaattatccaaactgaaatacaaagaggaaaagaatgaataaataggaatgtggtatccaatgtctgtagaacaatatcgaatgcatataaccgcagccctagaagtaaaagagagaacacgccagaataaataactgaaaatataatagctaagaattttccacacctaacaacccaataacctcagaaaactccaaaatggataatgcaaatactatcacatttaaggacaccatagtaaaactgctggaaagcaaatatgaaatattaaaaacacatgggaaaaaaagatacattacatacaaagagaccactacagatacttctcaccagaaacaatggatgcaaaaagatagtgggatgacattttttaattattgaaagaaaaaagccaacacagaattctctatgcagagaaaacatccttcaaaagcaaaggggaagtaaagatatttctgataaacaaagctgggaagactcatcatcaggaaacatgaaatataaaaatactaaagggcatttgtttaggttaaggaaaacaataccagagagaaccctgagctctttctttaaaaagaaagcatcagaaagtggaactcattcagtaagtttaaaagtatatatatttagtgtgtgtgagtacatgtgtaaattttttaaaagacaactgaatatctaacacaataatatattttagaatttgtaacataatatgccaagagctcaaaggatgggaaagaaataatgaacttaactttttaagtttcttgcattgtcataaagtaacattatcctaagtggaccatggtaaattaatgatgtatattataattccctacagcaactacagaaaacataatacatagaatgatggcaaaatatttacggagaagaaaagaacaataaaacgaaagaatagaaaacaaaaagcaaggtggtatatttagcccaattacatcaatacttacattaaacataaatggactaaatactccatgtaaaaggcacgggttatcaatctagaataatctttttattaataaatgggagacccaattgttgtttgtttataagaaatatactttactatacagacaaaataggctaaaagtaaaacagataaaaaacatatagcagacaagtactaaggataagaaagttgctctgactatattaatattaaacaaagttacataaaaacaaagcaaattatccagagacaaagagaatattttatgataaaagtgtcaattatgaaagtgtcaattaatagaagacataacaatctaaatgtgtgtacacttagtaacaaagcatctaaataatgggaaaaatataatggatataacagattgaaatacatcaaatatataaaaatcataaattagtaattttataaatgagcaaataaataaataggaaatattttaatacataaaatgaaacctaattggatgtcttaggagattatctgtgcatcatctctttattttgaaaaataatacattaaaaaaagatgtgaacatcttttctgcctttactttatgaactattcctctgggtagccaaatagataagcaaaaggtcgtctttttagaagaactacagttaataaatgcaggagaatgtataaaactctggcctatagtcacacaatggaatattaaacaacaactaaaataaatgcactagagtgacatggcaactatatggacaattataaaagtatacttagtaaaagaagtaaaacacagaggactatacaacatatgataccatagacctataggtcaataaaaaccataaaactaacaatatattatttggggatgcatacatatatgattaaacattctgcttaaagcaagggaatgatacacaaatttcaaaatagtggttacccatggagaagaatttgtgacaaggtaggagagggtgcaacagtattattaatcagagaatttgtgacaaggtaggagaggctgcaacagtgttattaatcagagtgacataagcaagatggtggaatagaagttttctatcatcaatcccctaaaggagcatcaatttgaccactacctacaaaggaaaatacatctgtgggagtccagagtccaacagagaagttttagcacacagttggagcacaagatccagaataaatgcactgaagagactaagaagaggatgggtaagagggatgacccttatcgcccctcccccaaggtggcacagctcagtgccaaaagagataccctcaccacaatttctctcacaatggaaagtgagagtgcagtgagtaagctcctgggtaccccagctgtgcaggatgctgtccaggaagcccacttctttcttgccccacccagaatactgaagtgattggcacaattaagtagttgaggaggttaggagaaggaaggggagggaggccctgatgctactaaccactccatgactccttcagaaagcctgcacacaagccatgtgggatgccttgcctgtgtaacacccctaaacagccccatgggcaccccaaattctctattcacaacaccttcccccaggccaactccccaagcatgaccccatggatggcaaatagaagtgtcttgtgcagatagccagctcaactctgcaggattgagaaaaggcataaaatattaagaatacctccccaaaacaaaagcgaataaaagacatggaataggcgtaaaaaaaaggtttaagagcgtctcagaatccctagctgggctgactggtgaaggtgtttctctcttgaaactagttagtagagactggaggacataattgcttcaactgcaaagccagtaatgcaacatgtcaaagaacaaaaagttgaggaaacatgacactatcaaagaaacataataatatcccattaattgatcaaaaaaatggagatctacaaattgtctgaaaaataattcaaaataattgtttttgggaagctcagcaagctacaaaaaatatatagacaacacaataaaatcagaaaaacatacatgaacaaaataagaaatttaataaaaagattaaaatcatgcaaaataatcacaaacagattctgaaaaatacaatcaatgaaatgaaaaaatttaatagagaacattaacagcagacttgataaagaatcaatctgataaagatttgaaagaatctgtgaactcaaagacagctcatttaaaaatattccatcagagaagaaaaaaaaatgaaaagaaataaagcctacaggatttatggagtaccatctagcattatggaagttcaaacaggagaagagaaagagaaagaaagacacatagcttttttttaagagttaaaaactactcaaatctggggagagatataggcatccaaatacaagaagctcaaatgtctctaaacagcttccactgaaaacatacttcatcaagatacattattatcaaatcatcaaaaaccaaatgcaaagggagaaaattttaaagcagcaagagaggctcatcacatacaagaaaattcccaaaggtgtcaacagatttctcagtagaaaccttgcaggccaggagagagtaggataatgtatttgaagtgccagaattaaaaacaaaaacaaacaaacaaaatcctgccaaccgagaatattttacctggcaaagctgtccttcagaaaaggaaaaataaaggttttcccagaaaaacaaacttaaaggagttcaccatcattaaacttgttttacaagaaatgctaaagggagttctactagctgaaatgaaaggatgctatttagtaacatgaaaacatatcaaggtataaaactcgttggtgaaggaaaggacatagtcaagtttagaatactttaatactgaattgatggtatataaaagacataactctggtataatggttaaaagacaaaaatatttaaaaatacctgtagctacaataatttgttaacagatacacaacataaaaagatgtaaattgtggtatcaaaaacataaaatggatagggagataaaactgtagagttttcatatctaatcaaagttagctgttagcttaaaatagattttcataactatacaatttttatgtatgtttcatagtaactacaaagcaaaagagcatgacattacagaaagtcatcaaatcacaaagacagcaagaaaagaacaaagggtctacaaaacacccagaaaataacaaaacggcaatagtacatccctactatcaataattacattgaatgtaaatatactaaattctacaataaaaaggcaaacagtggcatacagacccaactatatgctatatacactcactaaagctttaaggatacacatagattaaaaatgaagggatgaaaaaaagatataaatgaaaaccaaaagacagcgggggagctatatttattataagacaaagtagacttcaagtcaaaaggtgtaacaacagataaagcaggtcattatagaatgataaagtgattaattcaccaaaaggatgtaacaattgtaaatacatatgtacccatcatcagaatacctaaacaaatattaacagatctgaagaggacagatagcaataaaataatagtagagaacttcaatatcccactttcaacaatggatagattatgcaaatagaaaataaggaaacattaaatttgaactatatgttagatctaatggacctaacagacatacagaacattccacccaacagcagccaaatatacagatagccagctcaactctgcaggattttctcaagtgcacacaggatactttccaggatgtgctaggccacaaaaaaactcttaacaaatttaagaacattgaaatcataccaagtctttcccagccacaacagaattaaatagaaacaggtggaaaactagaaaatttgcaaatatatggaaattaaataacacactctgaaagaaacaatgggtcaaggaagaaattaaaagggaaattttaaaatatctgagacaaacaaaaatggaaacacaacataacaaaatgtatgtgtgcagaaaaagcagttctaaaacagaagttaacagcaacatacacctacatgaaaaaagaaagaccttaaacaaacaacctaattttatacttcaataaactagaaaaagaaaaacatacgaaggccaaagttagcagaaggaaggaaataacaaagatcagagcagaaataaataaaatcaagactagataaccaatagaaaagatcaacaaaaccaagctgttttagaaaagagaaacaaaattgacaaacttttagctagactaagaataaaagaaaaaagactaaaataaaatcataaatgaaaaaagacacattacaactgataccacagaaatccaaaagattacaagacactaccatgaacaattatatgctaacaaattagataacctagtagaaatgcataaattcctagaaatatataatctaccaacattgaatcatgaagaaaaagaaaatctcaacagaccaataagaagtaaggaaattgaatcagtaatcaagaatctctcatccaagaaaagcccagaacctggtagctttgctactgagttctaccaaacatttaaagaactaataacaatccttctcaactctttcaaaaaaccaagtaagagggaatatttccaaactcattttacaagagcagcattgccttcataccaaagctaagcaaaggcattgtaagaaaagaaaattactgtccaatatccttgatgacacagatgcaaaaattctcaataaaatactagcaaactgaattcaatagcacattaaaatgttcattcaccatgaccaagtgagatttgtctccagaatgtaaggatggctcccatatgcaaatttataaatgggacacaccacattaatagaatgaagaacaaaaaccatatgatcatctcaagagagacagaagaagcacttgagaaaattcaacatgctttcatgattaaaaaaagaaactctcaacaaattaggtacagaatgcacctcaacacaataaagacctcaacttcaatggtcaaaagttgaaagcttttcctctaacatcaggaacaagataaggatacccactctcatcacttcttttcaacacagtactgcaagtcttagccagagaaattaggccaaaaaaaaaaacaaaagagagagaattttggtacattgtgtttccatttttgtttgcctaaacaaaaaggcatccaaatcagaaagggagaagtaaaactgttactattggcagatgacaaaatgttatatatagaaaactgtaaatacttcatcaaaaaactattaaaataaacaaattcagtacagttgcaggacacaaaatcaacatacaaaaatcagttgcatttctatacactaacaataaaatatccaaaaagatattaagaaaataatcccatttataatagcatcaaaaagaataaaatattcagatataaatttaactaagaagataaaagacctgtacactcaaaactataaaacattgggctaggaacagtggctcactcctataatcccagcattttgggaggccaaagcatgaggattgcttgagtccaggagtttgagaccagcctggcaacatagccaagacctcatctttacgaaaaataaaaataatatccgggcatggtggcacgtgtccgtagtcccacctattcaggaggctgaggtgggaggatcacttgagcccaggaggcgattccattgagccatgattgtgcaactgtactccagcctgggtgacacagtgagaccctgtctcaaaagaaaaaaacaaaaataaaagctataaaataatgatgaagaaactgaagaaaaaaataagtgcagctatctgtgttctgtgttcacggactgaaagaatactgtcaaaacatccatactacccaaagtgatccacagattgaatgtaatccttatcaaaatttcaatgatgtttttcacagaaatagaaagaacaatgctaaaattcatacagaaccacaaaacaccctaattagctaatgcaatcttgtgcaagaaaaacaagggtggaagcatcatgtgtcctaacttcaaattatattacaaagctatagtaaccaaaatagtgtggcactggcataaaaacagaaacacagatcaatggaacagaatagaaagcctagaaataaacccacacatacgcagtcaactaatctttgacaaaggcaataaaacacacaatggagaagggatgttctcttcaaaaatcgggttgaaaaaactgaatatctacgtgcaaaaaataaaattggatccttataccatacacaaaaaccaactcaaaatagattaaagatttaaacataatacctagactcctggaagagtaaaactaaaggagtaaaactcctagaagaaaacatagggaagaagctccatgacaaatgtgttggaaatgattttttttttttgatatgacaacaaaagcacaggcaacaaaagcaaaaataagcaagtaggactacatcaaactgaaaggtttctgcacagcaaaggagacaatcaacaaaatgaaagcaatccattgaatgggaaaaaatatttgcaaactaaatactagttgagcatacctaacccaaaaatctaaaagctgaaatgctccaaaatttgaaattttttgagtgccaacatgatactcaaaggaaatgctcattggggcatttcagatttccaattttcagattagggatgctcaactggtatgtattctgcaattattccaaaatctgaaaaactccgaaattcaaaaaacttctggtgcccagcatttcagataaaggatactcaatctgtagccaataagggattaaaatccaaaatatataaggacctcactagcaaaaaataaaataaactaaaataactttattttttataatggacaaaggacatgaataggacattctcccaaagatacacaaatagccaataggtagttatatgaaaagttgttcaacatcactatcagggaagtgcaaatcaaaaccacaatgaggtattccctcacacctcttaggatggctactaccaaaacatcaaaaaataaaaagtgttgacaaggatgtggagaaaagggaacccttgtacactgttggtggaattataaattagtacagccattctggaaaacaacatggaggttcctcaaaaagttaaaaacagaactaccatataatcgaacaatcccacttctcgttgtatatgcaaaggaaatgaaatcagtacctcaaacagacaattgcactccaatgttccctgcagcattattcacaatagccaagatatggaaactacctaagtgtctatcaatgaatgaatgaatgaatgaagaaagtgtgtgtgtgtgtgtgtgtgtgtgtgtgtgtgtgtgtgatttagcctttaaaaccaagaaaatcctgtcatttgtgacaacatggatgaacttagaggatatcaggctaagtgaaataagccaaacaaaaaaagacaactacagcatgttctcacttatatataaaaatctaaagtcaagcttatagaaacagagaatagaagagtgtttaccagggtgaggaaatgaggagatagtgtcacagggtacgaacttatggttgtaagatgaataaattctggaggattaatgtattagcattgtgattacagttaataataatgtattgtagaactgaactttgctgagagagtagatctttattctcacgacaccaaaaaaggtaactatgtgagttgatggattatgttaattagtttgattgtggcaatcatctcacgtttttccatttgtctgtgtcatctctgatttctttaagaagtgttttgtaattcttttcctgtttttgtttttgtttttcttgagaaggagtctctgtcacccaggctggagtgcaatggtgcaatctcggccaaccgcaacttccaccttcctgggttcaagcgattctcctgcctcagcctcctgactagctgagactacaggcgcgcaccatcacgcccggctaatttttgtattttttagtagagacagggtttcaccatattggacaggctggtctcaaactcctgaccttgtgatccacccaccttggcctcccaaagtgctgggattacaggcgtgagccaccacgtctggccttgtaattcttgttgtagagatctttcaccttcctggtcaaaaaactacctactgggtactatgcttattacctgggtgatgaaataatctgtacaccaaacccctgcaatttacctatataacaaacctttacgtgtacccctgaacctaaaatgaaagttaataaataaagattatattggttacttatgcaaagcaccttccttcttttctagacttaaaaaaaaaacagtagaatgaggctaaatgagcacatatttgaattttactatgctaatgaaacagcattatactatgtcatattaggacagttacaacacttattgaacagaaagagtttattaatttccacactaattttgcaaatgatacttgagaggaaaacaaattcaaacacaactaggaatcttgccccagaaccaagaagcaaagcagaacataaacaatatgaaaaaggccagattccacttcttctactcaatttaagtgaaatgaagatataaacaaactttgtggtggcatttttttatctactatatttgatttttcaaaacaaaaacatccattttctatggccagctctctgttagccaaaaataaaagatgcatggttttggtaagaacagatttaaatgaaaattacatgatttttttaactctctaaatacctaatctataacttttctagtaaaaataaaaatagctaattaaatttaaatttagcctttcttcttccttctcacattattctaccttcattgagggaagacacactatattcctcgggcattcaggccctgtttgacctctctgaactacagctttacttgaaaaagagaatcattatgtaaaaagtactcagcacagtacctgaccatggcacatgctcaacaaatgctaactactgttatcatccttattattatctcttttagtttttggttcatccttattactgatcacagaatgatggcaagtgtcaagtttagtaggataccggtggccaccacctacacatctactcccttctcctttccagaatgaaatttgatttccttctgctttccacccacccacagtcatgtacataacccatacgcatgtcctgtactcatcactggttcatgggtaatcccattttcctctgtcagtgattgatccagaaataaacatacgacattagccaatcaacaaaacattgactgagaagtctgctggggagcttctaaagaaagagttcctcattcctaggaaaaaaaaaaaaactaaaagaagattttttttttaattcctctggagatctttttgtgatgagttttctggcaatgcagtagccactgggctatcagcccaagaaagaagccaacaatgaagcaacggagcaagcaagagaagtggagaaccaggtccttgatgtcatcaatggagcccgtgaacaaattaaccctggagtcttcctacctctgaacttcctcttatgcaaaatcatgtattttcttattattgaagccaatttgtgctgtaatttccgttaactgcaacccaaagcaccctaatcactacagtaagggaaaagggtaatagattttatcaaaactacaccaatccaaacttaaactacccttcacttcatagaacaaagcctctaccatgaatacctgaagttccgggtttttttattattattatcatactttaagttctagggtacatgtgcacaatgtacaggtttgttacatctgtatacatgtgccatgttggtgtgctgcaccccacccattaacttgtcatttaacattaggtatatctcctaatgctatccctcccccctcccccaccccacaacaggctccagtgtgtgacgtttcccttcctgtgtccaagtgttctcattgttcaattctcacctatgagtgagaacatgaggtgtttggttttttgtccttgcgatagtttgctgagaatgatggtttccagcttcatccatgtccctacaaaggacatgaactcatccttttttatggctgtatactattccatggtgtatatgtgccacattttcttaatccactctaccattgatggacacttgggttggttccaagtctctgctattgcaaatagtgccgcaatatacatacctgtgcatgtgtctttatagcagcatgttttataatcctttgggtatatacccagtaatgggatggctgggtcaaatggtatttctagttctagatccctgaggaatcgccacactgtcttccacaatggttgaactagtttacagtcctaccaacagtgtaaaagtgttcctatttctccacatcctctccagcatctgttgtttcctgacttcttaatgatcaccattctaactggtgtgagatggtatctcattgtggttttgatttgcatttatctgataagcagtgatgatgagcattttttcatgtgtctgttggctgcataaatgtcttcttttgagaagtgtctgttcatcttctttgcccactttttgataaggttgtttttttcttgtaaatttgttggagttctttgtaggttctggctattagccctttgtcagatgagtagattgcaaaacttttctcccattctgtaggttgcctgttcactctgatagtagtttttttgctgtgcagaagctctttagtttaattagatcccatttgtcaattttggcttttgttgccattgcttttggtatattagtcatgaagtctttgcccatgcctatgtcctgaatggtattgcctaggttttcttatatggtttttatggttttaggtctaacatttaagtctttgatccatcttgaattaatttttgtataaagtgtaaggaagggatccagtttcagccttctacatacagctagccagttttcccggcaccatttattaaatagggaatcctttccccattgcttgtttttgtcaggtttgtcaaagatcagatggttgtagatgtgtgatattatttctgagggctctgttctgttccattggtctatatctctgttttggtaccagtaccatgctgttttggttactgtagccttgtagtatagtttgaagtcaggtagcgagatgcctccagctttgttcttttggcttaggattgtcttggcaatgtgggctcttttttggttccatatgaactttaaagtagcaaacaggaacactagttccagtttaccaatgaggaacaagtcagtcattttgccaatcagaatctgtttgacagtgcttcaaaaaagtaaagggttcctgaattcaattcaactgatgtttattgagtacctactatatctttaagccaatagtctcgtcctcaaggagctcctaggctttctggagaaaaacaaccatacgagtagtataagttccacatcatggcaccactgaccttggagggagtaaatctttgaagttgggcatgggaagaaacaaaagagggagggagggagggagagagacagaaggcagagcaagaagtggggagacagagagggagaatggctgcagaaaagagaagatatttagctcatctcaggcttcaccacatggataaggagggaagggattctaaacaagagcaaaaagagaaacatgcactcctcaagaaattgtgctaagttgtttacattgcaattatagcagaaagaaaaaataaagtgaatgacggtagctaggactttctattaaataataagagttgcccagacttgtagattaataagacaaacctgtgcaattcccatagtgagtggctgaaaactgtctatgaacttgatggcacaggcagggtttaacttgcaaaggtggttctgaggaaagtccaggactacattgcttatgcttattccagatacaaatgttataattctgatatgaaaagctacaaagaaagacctgctactaagatgaagaataaaatcaaaacaggtaagatgagtcagacaaaggagggtatgtaaaacaaagataaaaaatctttaacttgagaatattatatttccatatcccacaaaatttacttttgcatgagaaggaaagcataacaggtagagcagaggcaaatctaaattttaaggacaagaaagaactcaggtgaaacaaatgtgcagcaaatcttcaaatccttattattctctgacatgaattttactagctatcttagctatactgcagtaaatactcttttatatatctgagaacacatcactacatcatcttagcagatttcaattgggagcctattaattattctatcatcaatattagtaaacagtgatcattatgatagattacaacatatataatttactaggaaattttgaagaaccagtaaaacattctagggctgggatagagagagagaaatggagaaacaagaactcctcagcattattaaacacagccataacagagtcccgactaacaggaaatgcaatggtgcgaagtgagaacatccatgataattagcatagctgtgtgtttctcctccataaggaaaggtgtcccaattctgggatggatgggcacaatccttccaatctgctccctccgttaggattcaagctgaagtctgattccaaagcccataaatccctcacctcaatgtgcccctaagtgtacttgctcttcaattcaatgtaggtacaggcagacctaaaataccattgtagaattttagttgaagtctctatttcttcaatatccaactgagattttttaaaacaactatccatgctttctactagtcagtatttatttcaattctttttcatcaaagctaaaagaaaaacacaacatacaaataagtgtacttttcatgatatgaacaaaacattctgaaaataaaaatgtaaggtatctttaatcgtggcattttatactgtgggctggatcatgctgcaattcactaatgagaaccatgacatacattcaataacaagttaataaaaatgcaaactgtttctacattttacatttacatgttcccactttttctccatgattcatcaataaatctttttgcccaaattaaccagccatcatgaacagagctagttaaaataaatacatttgattcagcactatgcctttctaacccctctatcagcatcttttcaagttagcagtttgttgtattcacttctgtttgcagcaagaaccttggctaacatacaggaattggtatattccataagagtctaaaaacataagcatcacttcttccaacacaataagcctgtcttggtagtctccatacatgctagaccaaatggtcggttgttaaactattcattaatgctcacagggatacccaagagtcaagaatatacaccagatcatcttagctttagatgcaccaaaacacaatgaggaaagcaactggtaatttgtatgtgatgggtgttgcacagcaccactttgtccatcaaagtgttgtcttgctgcttaaagtactgtctgtggaccagcagcactggcattatctgggagcttgcgaaaatgtagaatcccaagactcatcccagacccactggatcatagcctgccttttaacaagatccccaaggtgattcatacacttaaaaaaaaaaaaaaaaaaaaaaacttgagaatacaccattcagattattatcccaaagaatgctgagaaacaggagcccaaactaaagtttgtgtttaaagatcagtacaccttacactgacaatgtccagggaaatcttaagaagaattaaatatctacatgtcaaacatctgaaagcaaaaccccggaattccctgggcatcaattttttcatgacagcttgccagtatcagacatactaagtaccttcaaaaagtgatgagttataccatggacaactttcatagcaacaaattatcaatttacaaaactcaaagtcaacacattgtacctcacagtcatttaagctggcatgactttaaagtacacacaaatatgaagcaacccattggaactatttgatttatgttaaacagaactatggaatttaaacattcgtatgctcaaccaaaccctattcctagccagtcggctcactgatcagtttacagatatccttccaacatatactgttcagctaaatttaatatattttttaaaataaatcttacttcaagtaaatttcctgagctgaaaagaactacagcaaaataataccaaaaacagccctgtgccataaaaggcactagttgtatttagtgaattctgcatttcacaagaaccttctacagagggaaccaaggtggcaaacccacgaaggccttgagtccagcaagggccatgaagcagcatgtcacaaagaaattgtttttctcctccttttgatgagttatgctttcaagtcaggaaattagaaacaggtgtgccagagggcacacacatcctcgctccacactgaaaaacacacgtttccaattttcaaacatgaaagagactcctgttgaatgaaagaagaaatgaaaatccagccctgtttctgtgaaccatatgaagggagcttagaaagtctttgacaggttgctcaacttaccccctctccaactgacagcaggtagtactccacaatgggaaggaaaaggcattctttcaagtgagaacaatcaaagggagaactacatcaaggatggcagaactggcattttaactcatcacttgatcttacgcctttgtttttttttttttttttttttaacatttcttcaccttgtgttttaaaattagaagtctgttctttcacaaaacaacaacaaagcaatgcaaagtaagtatctagcaaaaaaaatctgagaaattaaaacatcaaaagtgcatcttggggatcactttatccattatatcccaggtctacaatctctttcagagaaagacttaccttccttccatgatgtcctcagctcttctagaggttaggggctgaagacatttcagtgagtgtaggagggtgatgggtagtgttaagattaaaaacaactggttttgttgagatttggggagagaaaggtggcaagaagggagatgtactaatggctgcaacaacagtcaagccatcaggtacactgaggtacctgcaagtgatcctttgggaagcgccacagtgcatattccctaggtgaatggatgcagcagagcctcattcggtgctaatataagccttttgctatagctaatatgtcaacatattcctatattggcaagaaggtttcctatattaccaaggccccaggtttcatgtcttttgaggacaaggactatgtttttaattctctcttatcataaccaggctagaacataaaataagagcctctaaaacagctgctgctttattgcatgaggccaattacaagtcgtcttgctgaggagcaaaatacatgaactcatgatgcatggaaagatatccttcatatcctttaaaattatgtttggaagaataataatacataaaaatgttcattataaaatattaaatgaacaaagtacaatacaagctaagcagtatttccgcttttgtttaatggcaaaaatccaccgaaaatattaatagtgactaccacaggatggcaaaaattatcagtttcatttcccaaatcctatcaatgagcatgcattatttcacaatcaggaaaaaaatctactcatttaaaatctctaagatacaagtaacatgtcgcactgaatgaaaggaagaaatccactcatttaaaatctctaagatatatcaattgctgtcacattgaactggtttcttagaaaatcatctggcataattcagaattctacataattgcataccatcagtgactttacttatataaaaagcaagaagcaatatattaaaagttaatcagatatgaagtgacctaattagagtatgcaataaactcagaatagaattcccatcccagataattacttcagttcttagaaatgtgctggtagtttatatactctgttatctgtaaatgaatattatttttcccacccccaacaaccaaacagtccaaagagttaagtgcttttaagatgacaatgtttacaaacattagggttttatctaggctcacatctagaagtcataattcacaaaaagatttcccatggcattattcctaaccccacatattatgtctcaaattatttcagctccagtggcagctcctcagcattctaagaatctcattgagagtgacaaaaattatgaaggtttattctttcataaggacaagaaacttctgagaagccagtgtcagcctgcccaacaaggcagattaaggaatcaaagtggactaaagagtctggatgtcaccaacaggactaagagcaatgtatttaactccttgactagttttgcctctcagcgtctggatcattcctcatcatgccagaacactctcagagaagaaagagctatcttcatgtatcttctaaaagtatgatcatctccctactcaagagtccccctttcatacaaaagaaaatgtctaaacaccacgacctaagtccccaaattaagccccaaacacctcagactcaatcatcttcttcaggcatcctctgctcttatcaagaatataccactcttagcccctcatttgccttcctctcagccttcactcatccgggcttcactggcttaccccaccacaatgtatttgtttgtcattcatattcattcacactcattcagcagttgtaggtaataagcaacattcacacatcaacgaacaaagctgatgaaaatcccaacccctaaggaatttagagcagggtagaaaataaaaagaaaatagccaagagctaaaaatagaaccaccatttgacccagcaatcccattactgggtatatactcaaaggaaaataaattgttctaccaaaaagacaaggcactcacatgtccatcatagtattattcactatagcaaagacctggaatcaacctagatgcccatcagtggtgaattaacaaataaaatgtggtacatatacaccatagaacactacacagccacagaaaagaacaaaaaaaatatcccttgcagcaacatggatgtagttggaggtcattatcctaagcaaattaatgcagaaacagaaaaccaaataccctatattctcacttatatgtggcagctacacattgggtacacatggacataaagataggaacaatagacaatgaggactactagagtgcggaggaaagaagaggcacaagggttgaaaaactatctattgggtactacactcatgacctgggtgataggatcaatcgtaccacaacctcagtatcatgcgatatattcatgtaacaaacctgcaaatgtacccatgaatctacagtaaaagttgaaattaaaagaaagaaaaagaaataaaggacaactcaaattagaaaataaaaccgatccagcagcacatcaaaaagcttatccaccatgatcaagtgggcttcatccctgggatgcaaggctggttcaacatacgaaaatcaataaatgtaatccagcatataaacagaaccaatgacaaaaaccatatgattatcccaacagatgcagaaaaggcctttgacaaaattcaacaacccttcatgctaaaaactctcaataaattaggtactgatgggaagtatctcaaaataataagagctatctatgacaaacccacagccaatatcgtactgaatgggcaaaaactggaagcattccctttgaaaattggcacaagacagggatgccctctctcaccactcctatttaacatagtgttggaagttctggccagggcaatcaggcaggagaaggaaataaaggatattcaattatgaaaaaaggaagtcaaattgtccctgtttgcagatgacatgattgtatatctagaaaacctcattgtctcagcccaaaatctccttaagctggtaggcaacttcagcaaagtctcaggatacaaaatcaatgtgcaaaaatcacaagcattcttatacaccaataacagacaaacagagagccaaatcatgagtgaactcccattcacaattgcttcaaagagaataaaatagctaggaatccaacttacaagggaagtgaaggacctcttcaaggagaactacaaaccactgctcaatgaaataaaacaggatacaaacaaatgaaagaacattccatgctcatgggtaggaagaatcaatatcgggaaaatggccatactgtccaaggtaatttatagattcaatgccatccccatcaagctaccaatgactttcttcacagaattggaaaaaactactttaaagttcatatgaaaccaaaaaagagcccacattgccaagtcaatcctaagccaaaagaacaaagctggaggcatctcgctacctgacttcaaactatattataagactacagtaaccaaaacagcacggtactggtaccaaaacagagatatagaccaatggaacagaacagagccctcagaaacaatgccacatatctacaaccatctggtctttgacaaacctgacaaaaacaagaaatggggaaacgattccctatttaataaatggtgctgggaaaactggctagccgtatgtagaaggctgaaactggatcccttccttacaccttatacaaaaattaattcaagatggatcaaagacttaactgttagacctgaaaccataaaaaccatataagaaaacctaggcaataccattcaggacataggcaagggcaaggacttcatgtctaaaacaccaaaagcaatggcaacaaaagccaaaattgacaaatgggatctaattaaactaaagagcttctgcacagcaaaagaaactactatcagagtgaacaggcaacctatagaatgggagaaaatttttgcaatctactcatctgacaaagggctaatatccagaatctacaatgaactccaacaaatttacaagaaaaaaacaaacaaccccatcaaaaagtgggcaaagaagatgaacagacacttctcaaaagaagacatttatgcaaccaaaagacacatgaaaaaatgctcatcatcactggccatcagagaaatacgtatcaaaaccacaatgagataccatctcacaccagttagaatggtgatcattaaaaagtcaggaaacaacagatgctggagaggatgtggagaaataggaacacttttacactgttggtgggactgtaaactagttcaaccattgtggaagtcagtgtggcgattcctcagggatctagaactagaaataccatttgacccagcaatcccattactgggtatatacccaaaggattagaaatcatgctgctataaagacacatgcacacgtatgtttactgtggcactattcacaatagcaaagacttggaaccaacccaaatgtccaacaatgatagactggattaagaaaatgtggcacatatacaccatggaatactatgcagccataaaaaaggatgagttcatgtcctttttagggacatggatgaagctggaaaccatcattccatcattctcagcaaactatcgcaaggacaaaaaaccaaacaccgcatgttctcactcataggtgggaattgaacaatgagaacacatggacacaggaaggggaacatcacacaccggggcttgttgtggggtgggggaggggggagggatagcattaggagatatacctaatgttaaatgacgagttaatgggtgcagcacaccaacatggcacatgtatacatatgtaactaatctgcacgttgtgcacatgtaccctaaaacttaaagtataataataaaattaaattaaattaaattaaaccaattttttaaaaagaaaattgtgtaaagatataaaatattagataatgatacttgctacgggaaaaaataaaacatgaaagggagacaggaaatgttggctgaaggaagaactccatgtttatataggatggctgcagaagaactcatcaaggtgactcatttgaataaaggtctgatgaggtgagagtgggggcttgagacactgagggtggaggagaagcagcagcttgacaaagcccctatggcgggagtgtgcgtggcatgtgtgaagtactgcaaaggagccaccgtagctggaattgtgtgagcaagagaagaaaagcaagaggttctgaggggaagctgggaagtatctccaacaaggccttataggcccttcattaggactgtggctttcccatttattaagatgggaagtggcttaacatttcaaaatagaggtatatcgtttgagttcggtttgaacaccagttgcagggttgcaaaacaaataaagggggaatggggcaaaaagcaagagaccagctaggaggctagcaatgatccagattagagatgatggcaccacagaactgttggtggccattaacgtgctgagaagtggtcagattttaaatatattcagagaggagagtaaacaaagtttgttggtgaattggatgtgcgtgagatagaaaagagggtcaaggatgaacccaaaattttgacttgagccactggaattgacacttgctgtggggaaaatatttcaagagaacacgtttagggttaggcaagagctcatattcggacatgctaaatagatgtctgttatatatacaagtggagattttaacaagcacttgaattataactcagttatggagagaggcccaggttggagataaaattgtaggaatcatcagcacatagatggtacttagccatcagactggatgagacacaaagggagcaggtatacaaagaaagagagaagaggttcaaggactaagcactgaggcactccaacactgagacgtcaaagagatgaggaatattaacaaaggagactaagaaggagcagccagtgaggtggcaggaaaaacaggagtgtgtggtccctggaagtctattaaggacagtatttacaggaggagcaagttatttgagcaaccgtgtcaaatgttgcttataggactaaaggataatcacatgactttagaggtaattgttaatcttgacaagaacagattggtggcgtggtagaggagaagtcctgactgaagtagaataaaattgagtgagagaagagaactaagaaaaataataaaccttgagtatagaaaattccttgaggtttcaccttgaagggttgctaagaaatggggagagggctagaaggaagactggaaccctaggtgatttgcactgagtcctcagtagaatagggcttgtattcaccaagagtgcctgtgacacacagagtacaagaatgactgctgctaaatagaagctgaagcatggattcctgcctgccttccacatacccttaaagagcaatgaccacatggcatttgtcaatatctcagcagtagtctcccattggctcctgctgtcacataacccccctctcacagagaaggctgtctcgtgccctcctgacaaaggtctctgggcacgagttttctaacacagtcccatagacaatctcccacagagggacagaggaagacctctggttgttaagttgagaaatcaaaaaggaatggcatattctcctagcccttgaggaagaaactaatcactagctcagaaatattgaggcataaggctgttctcaattttggtatttttttaatcccatctacctttgaagctactcctggcaagtcctgaccacaaccctctccgtcctcaggtttctagaaatgcccagagccaagaccttaaaaagcaaagaactgagaaaatcagaaatcctttggcctcacagcagaaacaaggtagtaggtctttcttcatgccagaatactttaaggaggggaaatgaagcctacatcttctgatcttagtcaattgccatcagtacccctgtactcactgtttccagcactttttgaggccaaagtgggaggatcactggagcccaggagttcaagaccagcccgggcaacacagcaagatcctgtctctacaaaaaaattaaaaattatccaggtgtgatggtgtgcacctgtagtcctacctacttgggaggctgaggcaggaggatcacttgagcccaggagtccaaggttgcaatgagccatgatcacaccactgcattcactccagcctaggcgacagagtgagactttgtcttttttttttttaaaggaaagaaaaaagaactgtatagacaagtaacggaaaagcaatgttaaggtaaaccaaagcataaacttaatctcttgcttttttcccctccttctgatcttctaatcttcaatctgctcgtcctttccatagccagagacatatcccagatatttctaacattatgtatttgctgtgttactgaaaaattatgtgtgaattcaaatgtggcaaattgaattatattttaaaatcctatttaaagaaagtccatggtgaataatctgtttgaaaaagtaagcattcttctcaaacagggaggacccacacatacatttcttaatttttatttgtataccgggcacttaccctgtacaaggctgtttgccaggcactcaggagacacaaatatacccacagccctctttcctcaagagtttatcttactgcctcaagacagtctgaaacaaattatttattttctagaaaaagctgagaataagaaaagcttttactataatttatcaattctaaaatatacttttttcacatttttaaacttctggattcaggtgtgttataactgatgcatcctcccatgtaatcctccaggcattacatgcctggtggcagtagtgacagagctgccactgcctctagatgcaagcggttcgcatgtgttgacccttcagttacgtgccgtgttggaactacatgtgttgagttaaactgttgtttaaaatgtgttcagaaggattacggtgtgatacagaattcaaattaaaaataactgtacacatagaaaggtatggaaatggcaatgaggcatgactttgctatcagtgaaggaaatacttctcactgatgagacatccctaattctatattttcctgtaaagcaaccaccatgcattaagtgatgagaaggcagtgtgttatactttaattgacagtcttttgtttccttagtggtataaaaataatggtgcatctgataaaggatgatgacttagattcaatgaaatacagtaagtattgagcccctactctgggacaagaaatgcactaaaagctttgtgtatgtcaacttacttaccccttacagtaatggtagatattattctggttttacaaataaccccttgcccaggctccacagctagtgggtctggaagagtctggacaggaactcatgtgcctgctctagtctatccctagctaggcaaattcctatgacgccagaacattagtcagagtttgaaaggtcagctcctgttaatccaccccctctccccaagcccttactcatttctcctcacccagtgatgagaacaagatgctagagtttatccctcaggctaatgaccaaatcacccatctggccttgggagagccctatcctaaccataactaactatcttttctccgcctttcaattatcaccttctaagatatataatcctaaaatgcaggccaggtctctggattttctgcagcagcctaaggcacaagtcttctttattttggccaaacagttgcaaaattcagtgctccacctttcttctgacttgatcacccaactctgccatgtgtttccattgtcaacttcatagcaacagccccatgagaaacaagaatgaggcaatcacacaaagtccaacggacaagagggactggagatttactctatcatccccaggttctgtgggctgatgatggttagtcttttagcttgcgaagagtataacatgacaagttgggtatctaagttaaaaagctacactggatgtcatgaactggaaagctagaggtatctttagacatatgaaactatcttcaactgacacaggataggcaaaagaggaaatattcaaaagcaatggagaaaaaccttaattttacaattttaactttacctacccattccttgcattctacttaatagaatcaaatccatggagtatgttcttattccaacttgcacatcaccaattttaaaataagggtaggggactggtggacaatctcctcggacttggaaatctcttttccaaattgacacaatcaggcaggctctcaggatttcagtttagaatagaagccaattctcctaacatctagatatgaaagtaatgtctaaacaacaacctatctcactgaacaacatattgaccacaaagaaaactcttataatacatgattccaactgtgatttctttgagacaatcaaaatgcaactatgaattagtctttgctttgttcaagtactacaattttccatagacacggggccatactaaattatgttcacagcctaatttgtaaacattatgcatcaaggttttcatgtgccaccaatattaaattaaaatttaaaattaactcatattattacattatgctcatttcttcaaaaatgactaaaaacaattttttgacaattatagtagtatggattcgattcaacattaattcattttagacttctcctgataggccaatggctcaaaaccatgtttttccactgatgcaagaaatggagctaggtcaggaggctgctaagataggcaggcatgagaagatgagtctgaaagaacagagtcaggaaagaagaaacagaaagaaaccacaaatatgagagtggtgccaagatttcaagtctgagcaaaggataggagaataagagcaatgaaagagatagaggacacaggagaaaggtgacacagggtggggatgaagaatgaaatgttctgttgaacctcatgagtctgatatgtatacacagcacccataggaacatgcccaccaggaagtcagaaaggactcacatgcacctcaaaagtccaaagtagatacagacatggaagccaatcccaagagagaacagctgaaatcatgagaacagcagaaataacaagaaatcagcaggagaaagcacagaattcaccaaaggctcaaccctggggctgtgggcaatgggaggacagaggagtaagaatctatgaagaaggccaagatggaacaggtcagagaggcagacaaaccaagagggttccaggatctatgctacatgcaaaagaaaaagtcacttgcatcagagatcgcagaaagagcagacagaaagcaggacaagagggctactggactgggtgctttgttagtgtggtggggcagaaaccaatgtgataagaaattggagagagaaaggtaggaaaggaagccatatttgtccactctcccgataaagtctgatgctgttggagagaaagggatgggactgtaacttgaaggataacatgaaaaaggaatgaatcaatattattttgtcaaccagaggtatcatcacataatgagaaaaggcttcacgtacatctggcacaggcatgattaaagtatggaaatagacaacaaccattctgcctattaaaactctccatgtccaccattcctcatctcctgcacacacgcacgcacgcacacacacatacgcacacacacactttgtactaaatgataatgcctttacaatatacatataaaaagaagacctgtattacattaaaagtgtcgttcaaggactgaatgtcataaactgtatatttggaaatgtaccttgtaagttttatgtcaacattttactcaagagattatctgttaatttttgaaattaactgctacttttatgtcttttgttatctaaacttggcagcatcatgggtcattagaaaaaatatagatctataaaaatataattaaccatagttaactccagagttgtattgaaaatgttagtgggtcgggtgcagtgacttaagcctgtaatcccagcactttgggaggcctaggagggcagatcacttgaggccaagagttcaagaccagcctggccaacatggcaaaaccctgtctctactaaaaatacaaaaaatcagccgggtgtggtggtgcacgcctgtaatcccagctactcggaaggctgaagcatgagaatcacttgaacctgggaggcagaaattgcagtgagccaagatcgcaccactgctccagcatggggacagagtgagactctgactcaaaaaaaaaaaaaaaaaaaaaaaaagaaaatgttagcaaagtatttacactgatactaaacaacccttaaaacctcgcaaatactgaagatctttcccacatccatacactgtcatagcacatgttctatgtttacccacaaatattgcttttaatcattaaatgattgacaaggttgaagttatgagaaatggttatgaaagcagcaaatacctgaggtactcacagctgtggagtaggggttatgagctccagtattttcagcccagcagccacatccataaagagcagcctggggaaaaaagaaaatagatataatatttcagaaatatcatatgtaattattagttttcaacagaaatcataccctctaataaagcctggtttaataatgatgtaaaacaactaggtgataataccagatgttgtataagacatacgcacacgatgcttttaatactatcaaaactatgttttcagatattccattaatcttaaaactttcagaaaatagcaaaagcaagtttcttagtgtcatcagcagtaattttttccttccctgaaaaacttctcccttttgtaatttgtcagctagttgttcttctggccccttaaaaccaatgtggttggcttaaaatagtagttttcaaactaggtgtgtgtcagatcacttggggagcttactgataagaaccctgattcctggaaattctgacttagtgtctggggcagacctaggaatcagtactgttaaccagggccatggggtactgggatgcagctggtcctcctgccatgctccaggaaaccctgcttcaagagggccttttccatgtctgtgttgacgtggcacaagaggaagtgcaaatagttctgtaccaaagggcccaatatatgctcactactgtgctagattcagccagatgaaaagaaaggaggcaaaaaggcctactcaagctcatcactttgttaggtggtggagcagatttatacatctgaaaccatcaggtacacaataagctactatggttttataacagattatgacaatcattcctattttgtttttaataatgctacttctcttcaatatccacaatgacttttctgactttgggagggaaatcacaactaataactcttccactccatagtaagaagtagagattaaaatttttaaaaaacctagctagctagctatcatagcaaaatacaaggtggcatgctcaagagttcattactaaatggttgataagaatgagaaacttgaaacaacctaaatgtcaatcagtgaggaaatggctaaactttggcatggcattatgtggaattcattgcaaaggttaaaaataaaagaattaagctttttaaaaagtctttaagaacaaatacagaaagagctcccaaacatattgttgaattgaaaacaatagcaagctacaatacattcagtattccctgccactgatggaggaaaaagatactcccataaagcagtactgatattttctaagagttcattctgaggactggggaataggctaagactgaggatggggaccagacttcagctttctatgatattctgttatttttttacaaggatcttagaaatcattcgctccaatattctacccagagcgggaatctccatgaaacatcccaggcacttctgacactgagaacctcactgcctcatgtgggaacacattctgtttacggacacttcccattggtagcaaatatgtgctgtattataacctccaaccactagtcctgcctctgctctctggaagtactgtaacctcccccagaaagtcctccaattttttaaaaacagctattttagttctcttttctaacccaaagaaacccaaatttgtgagctgttccccaagactctgcgatgcacaaacccaccactctctcataattaccctcctagagaaataagtcagtgtccaggataaccagagacggaagtctcccatgttcatgtgacccatagttgctatctccagatgttacagacaatatccctcttaaaattagaagcaagaactgagcgggatactctcaatatggtagacattgggaaatctgtttactgtttctgacaacaccacgcttctaaaatacatgctggctcagggtcagtgtggcaactgaaagcccttcagaagtgatttagaatatgaatttataaataaactggcagacttgtgggataactattcaactggtactccctgaagcaagtgctgggtcagccagtctcagagaacacaagaaatcaatggaaggacccattctttcttcattgaaaactatcatcttttacgtcccccacaattaacatgaccagtagcctgcactcaaaaaatagtaaataaggtcccaaggacacctcttataaagccaggggaggtcatctttctagaaaagaacatttacacttaccctttgctccttccctttaagaaaattccctttatgatacccttccttagtttcaagacctaaaattgtctttcttcttaaccttctgaaattcattgggctgagacagtgataggtaagataaaagaattagaggttgtccatctcttatccacttcattggataaaatatggcaaccttaagcaagcctttaaaaacaaatttttaaaatcttacttctttttggtagtaaaactgtattaaaattttattaaagctattatcatgcagtaaaagtaggtcatataaatgatattattattagtcttctctgggcaatagtttcctcttctatacaataaagataatgaaaatacctacctcatattgttgtcacaggatcatgcgaattaacgtacttgctgaacatagcaagtgcttaattaacagtagctatagctgttattactaggggctataatatgtaatttaaatacattttgacattgaatcttctacaagtttgtaaggtagccggttatccccattttacagaggtggaaagtggagctgaaagatgttaagtaacttgttcaaagtaaggggcatggtaaatggggaggtgggattagaatagaggtttacctagatcggaagtccacacttaaccagtaaactcaaccgcctatttgtgtgggggtggggtgaggtttaggaggacaaatgaaatataataattcctttctcatgtccaaactgtaaattcaaattattacagtaagctaaagaagcaaataagttctaattcaaattgccatttcttatcctttttttttttttttcttttttttgagacagaatcttgctctgtctcccaggctggagtgcagtggcatgtttggctcactgcaacctcagcctctcaggttcaagcaattctcctgcctcagtctccccaagtagctgggattacaggtgtcagccatcatgctcagataatttttgttctgttttgttttgttttgacacagagtctcactctcacccacgctggagtgcagtagcgagatctcagctcactgcaacctctgcctcccaggttcaagcgattctcttgccttatcccccccaactggctgggattacaggcttataccaccacgcccagctattttttgtatttttagtagagatgggtgtcaccatgttggccaagctggtcttgaactcctgacttcaactgatctacctgcattggcctcccaaagtgctgggaattacaggcgtgagccactgcacctggcttaatttttgtattgttagtagagatggcgtgagccaaagtgctgggattacagaaaacagtgagaaagtcatggggactataatgcattgaaggtgactctgctggcttctctcaccttctctacttctctatggggttttaccatgttggcccggctggtcttgaactcctgacctcaactgatctgcccaccttggccttccatgctgggattacaggagtgagccactgcgcctggcctcaaattaccattcaccatctgcactgctatcacatatctacagcagggtaatatgctaaaatttttaagtagttaattgtgcatttaaaatacattaaaagtatctagtttcagcacactttaaaaaataattagcctttgatataacttgcttttgtattttgtttcatttgggcttgtcaaaaagaactgttctttacctctcatctgatacttacatagtttcaagtttattacatctcctctatccaagcattataatccaattaagcaactgcattttcatataagcccttttactcctttcttccacactctttcctgattttctaactctcagaagctgtgtattcacaaactagccaagtgaggcaaaccaacacataaattttacggaagtatttcttttgctcaggacagttctaagtgcagtggcagaatagcttctagattgttagacgtaatatcctgctaacatagtccagaactatccttagttctgttgttgccattttgctaaccaaaacaaacagaaaacagtgagaaagtcatggggactataatgcatcaaaggtgactctgctggcttttctctcaccttctctactagcgtatccaaatctgatatgccaagcttgactttcctattgcaaacttgacaaatacacaggactttataatgtagaaaaataccatgaccagacaaaggcttttacaatgagttaaagcattgtacatacgttgagtaatcattccctatacagccccttgcacactaggcagagtagcacaaaactagttattcttcccttcccctttttcctagtctaggaatgtaagcagcttagagcagatcaaacaacaccactttggggtgtgcagtgatattctccatgaattggatctctctgcttcaaatagtcactaaccatcatgaaaaaagtaactgtgacactgactcttcttcaaatgtgacaaagtacacaaagcataacaagacacattccatctataagatgccacccaaatactgagtttaaatgaacccttgcaactactccgtgagaatatccaattcatctgttcactcaacaaacatttattaagcccacaagtaatgtgccaaaattgatttatcctcagaaagcttcctagatcaaatagattgttaaatttcattctcagtataaaactaaaaatgagagacgggggaaaggggcaaagtgaagaagatgtgcaagtgaactggggacaagcaaattttacataaattagaccatctccatttctagatttgttaagtggtatcatgtgttggtgacctgaaatactggttattttctaaaatggctgaaatgctggatcagaggagggatgtaaagggccaaatgtcacaatacatggaacagaggaaataaaaaatgtaactctaaaatcatttctccaactaaaaagcaagcagtatagtcaagtagagcttgttcctaaagagagtgacatttacagagagaaaatggaaactggcacacatttattaaatgtctactaaatacccaggccagtgcccagcctgctgaaaggagaaaaactaggatcaacgattgtaaagatgagaaacaaaccaattactatgagataggttttcttaaaaagaattttaaaaaggtatttggttgatgatttatactacatgttaaaaaacaatgacattcattttttctaaagaaaaaatgttcccactggttaaaaaattgtgagctaaaaattccatgctttactttgaaaggctagtttaaaaaacccataattacttacctgcccaactctccccggatgtttcaaggccaagcctccactggagacagcagcagcaacattcccttcgtggtccacaaccacagcgcctaccgtgtccaaagtgcctgagtcattttcctgcagagcaaaagtggcacaagtattcactaggcatggagtgggacaatctgatatgactacatagcacttttccatacaatcatgacagaacaaaatctaaactaatccctaagtggaacattgagcaatctcctaaaattatctattatcaagttgccatttaaatcctatttaagtcaaaatgtattttccaccgagaaatcccaaacaaaaggtatcctgttgcttttctctaataataaggctatagtgtctttttaatggaggaaatgtcacaatttaatataaattacagtatacagcagtatctcttcattctcaagaattaagttcatgtttgagaatgtgtagaggaaaccatcggtggcataaatgagctaataataaatactcttgttggtatttctttaagtattatatacaaacatctaatagaaatacattccacacaataaattaagaaaatggcatttacaatcttaaagtataccacactatcatttttctcttagagttccttgtttgtgagaaaatttatggcaagctcccttctctcctataacagtaacatgcttgccaattgtatggcagaaaagtgtacgttcttggaaggtttgtgtttcaatgttttgtcccaggtcccacatgtttaaggcacatagtgatatttactgactatgagccgctgtctcctacctccaaagtttatgggtcacctgtgcaagagagacaaacactacactactggatagaaacaatgattaagggaggcaagaaaaaaattcatggaaaaagaagtctcatatattaaaaaggggggttacggtaggtttttaggttaatagtagtcatggtggtgttcttatgctagggcattggttttcaaaccttgccctacaaccctagaccccacccttacccccaccaccagtatgcatgtaagagccaggcccaacgccgggttcaacatgaacagctcctcatcctgtgtgatttattgctcacattactgagcaggacttggttggtactgagagatccctaagaagcaaaatgacacactaaagccatcaccagaaaagtcaatgagctcccgggcccatctcagaagtttagcaacattgaagagtttctaaatagtggaagcagaattcaaacaagagatgtttccctaaagcaaactggaaaactcagaagtagagtgtgccacaacaaaattttacatcaagtctgttaggaaaaggtacttacatctagaatttatatttcttgctctaaattctaacttcccttaaatatactgatacactatgacagtacttagtttgataggaaatgctgaactggctgaaatgaatgctatattcctaatccctcttttaaccacagctagggaaagtctagccaatggatccacatggtcatatctcagaatgacatagttctgctcaaggcatgtgcccttcaagaatacttcctggcctgaactccctaaggaaaggtttgatccactccacatcacactgaatgcaacagacactcaggacatatttattttttaattaggatgcaggatgtctgtatccctggtggtacaaaacatgcccaatagtgagtaacatgcaatgccatcccaatgtcagggccagttttctacctctgtttcgcaagatttgacttcacgcaaatccagatgctgccgctatcttagggaagacttaacaataaccagacttgctcattcaggttggacaaagcaaagtctgtcttctctggtaggtaagattaagaacagcagtacggaaatgcattaaaaacattttattccagaaaagatggataatcttaaagagaaatatacttttaagaggaatatttgttttataatgctaataaataattttatatctttgcaatcttgggtagagaagtgttagttccccagatgccaagtttgatgtcacctttaagaaggcttctcaaattttaatgtgcacacacatcatcaggagaatttgtttaaatgcagattctgatggagcaatctgggaactatccaagactgtatatctaacaatattccacactatgctgatggtctaacagcatcccaccccaggggaccattatccaccaaatacctgccccattcattctgaagcaaactatttataggcacaaatctgctgaaggagaaacttaaactacctaaggctaacattatgccagtataaaagatttaagttctatcttgctcaactgtcaactgacagcatatcaccactattatactacatggatttggtatctatattttaaaatactgatcttacactttgaatagcaaacaaatctcacacaaataaacaaactgtaaaataactttcctcaacaataacaacagagaagtcaagaaagggtattcttttaagattatttttggaaatactgagtttttattgacagacatatgccagtactttttgcccttattctttgctataaaattctggaaatttttacacacttttttccctagcccaagtaaggcataatgtaaagtgactgtcttcatcagtcctaccagataaggatgattgcttctggtaaataatcaaattgtgactttcatcctatttcactgtctaacctttgagggagggttatgtctcttttttacatttcagttattttaattaataaatattatatatatttatggtatatagcatgatgttttgatataggcatagattgtagaatggcagaaatcaagctaattaacatatacattacctcacataatcatttatttctggcgagaatgcttacaatctactctcttaagggtatttttcattagctcttttttataaactccaactgctgatactacccatgcattctgtaaaacagaattttatagagggaataagtaacgtatacacaatgctatgcattatctgtaaagtaattttcctagcatttcaatcaggatattgtgaaccatgagaactgttatacctaaccaaactcctgtagaaagatacaaaaactgatgtcagtataactggattatacatacatggatttactgtaacttcgttttcaaaactgaaaagtcatgcaaataataaagaatcctgttccaaattaagctaaatattcctaagagcctgtaacacctaaaaaaaatcagaattacttcataaatattcaagaattagttcataggcttcacatactgcaaagcaaatttaaggatgatgaagtaatatttaagcatttttatgaagtgcagataaattaggtgaaagacaaacattggtattttggccataataatttcacagagctcgtttgtacaggaatgaaatcttagaaaggttaaaaaacatacaatgactgttactatatagagctactattacactcttacactctataaatacttaaaaaatatatgcactacacagatacacatatacctattgtccttgactaaaacatgctatttgtattacttttttgataaaattgtaactaaaaagcaactgtataaaactatagtcctcttcaaaataagcatgtatataaagttagcatagaggttacatgtgttaaagaaaacactgaaataaaactttcttgaagtaaccaataaataagcagtccctgttttctctgttccaaattagagatggttattatatagttattataagaattaaagtaacagatgtaaactactttaaaatgaataaatcccttcatacaaagttaaggcacttcccaccagaaaattaagcttctaatctgcactctctgaaatctgccaagagacaccatctatcagtctttttttttttttttttgagacagaatttcgctcttgttgcccaggctggagtgcaatggcatgatcttggctcacagcaacctccacctcccaggtttgagcgattctcctgcctcagcttcccgagtagggggattaaaggcacccaccaccacacccagctaatttttttgtatttttagtatagacacagtttcactatgttagccaggctggtcttgaactcctgacctcaggctatccacctgccttggcctcccaaagtgctgggattacaggcatgagccaccaggcccagccccatctaccagtcttttatcttattaactcagtctttcttctgtccagacttactcaaatatcaagtagctaaaaaataagaatatatcttaaatgtataagtgcattctaaaataggtctattatgggattatcttaatataatgataaagacacaaatgcattctttgaaaacataccaagccctcctcgtatacctctgtcaggtttgagagcagcattataactggcatgagcttccacttgagaaatgcagatgacttataccctaacatgacagtacaataatgccatcataaagctttcacatctctgagtatcctaaacacagagagatggctccagctacaggacatctagacctagctctatatctctcacaaatcagccatccaacagcagggccactgtgggctacagtttatcaactatgtgtaaacaaagtataatctagctaggccgggctgggtggctcacgcctgtaatcccagcactttgggacgccaaggtgggtggatctcctgaggccaggagttcaagactagcctggccaacatggtgaaaccctgtctctactacaaatacaaaaaaaaaaattagctaggcatggtggtgtgcacctgtagtcccagctactcagaggctgggatgggagaatcgcttgaacccaggaggtggaggttgcagtgagccgagatcacgccactgcactccagcctgggtgacacagtgagactctgtctcaaaaataataataatttagctagaattatctactctcacctatgtggactgcatgaaaccagcaaaaatctgaacataggaacactcaatgatattatcttccctctttagaaaatcatcttctgatgcccaatactattaacgatgtttcttataaactatagtcaagatgtctattcttaagtaatcttttattttctttgtttaataggtatgaattaaatggctttgcaacactatacaaattggtaccaaatatatttatagagcaagaggaaaaaaatgtataccatataaaaatctaaacagagtggtcaacatagcagaccctgcctctacaaaaaataaaaaacccagccaggcatggtggcacacacctgtagtctgagctactcaggaggctgaggctggaagatcccctgtgcccaggagtgcaaggctatagtgagcaatcgtcacaccactgcactccagtcaggacaacagagtaagacactatctctaaacaagcaaaaaaataaacaataaaatctttatactatttatttcctaaatcacttgacaaaaattaacagaagcattttcaggttaaaataaaaataacgtgtttgaaccatgcttttaaggggatttaacatatctgggttagaggaattaaattcataccataaaaaagattacttaaaaattccaaaccctcaaagatagcaaaggacgatgttttctaactggtagaattcctatacaatgttctggggtttgcaacattaaaggtggaaaaggcaacagttttcatcttggtttttaagataatcttttaaataatgaattggaagcttttctctttaaaatggaacagtttgaagggcctcagagtgcatgttgaatgagtgtgtgtaagtgatggtagagatcacacgaatactcatggcttaaattattacacagctaaacagtaaatactatcacaaaagtagttttatgcagctttaaatcatttctattctcactcatacgcagtttaattaatatcatttaacttatacccatagtgaaccactggttaaagattgagaacctgggatatgctgaacttgaaataaaaattacagcaagttccttaagatgacattaagtaggtcattaaactgcattcatcctatcaaaatacttacagaacacatctcaaggacttcaaatattaaatatttaatgataagtatgtccaatttgacttatttgtctgaaatgaatattaatcacaattttataattctaaatcaaaatttataagttctacattaaatataaacctacctatgacccaacaatgaaattcttaagtatttaccaaagagaaatcaaaatgtataccacaaaaagacttgtcaagggtgttcatggcacctttatttgcaatagccaaaacctgggaacaatccaaatgtctatcaacaggggaatgggtaaacgaatcatgatattgtcaatactggaagattgctgagcaataaaaaggagcccatgctatatgtaacaatatgaataatctttcagacatatgctgagcaaaagaagctggacacaaaagaacatatagactccattttaacgaacaagtaaaactatggtgaaaaagaatcagaaaattgttatcttcattggggaggacaccacctatgaaggggcacaagaaaactttctggagtcatggaaatattctatattttgataggagtattggttacatggttatatacacatgttaaaattcatcgaattatacactcaagatgcatgcattttactgtgtgtaaattttacctgtaaaaaaggcaaaaaaaaatcaatagcaatgtactatcttaaaaaacaaaaccaaacattcaaaacatcagatcatgaacaaatttttcaactttttcctattggcataaggcatatttaatacacatttggttgtaactataagaaaaaagggaaaacctgaaaaatatgaatgagatattaagagacatggctcaaagtctaatctgtggttaactatagagaatagacaaaataaaagagagaaaatatttaaagacaaaatggctcaaattttccagcactgatagaaaacaagaatcctgatctccaggaagccagagaaaaagggaaaaagccagatagaaaagagatgtcacctacaacagaatgacagccaaattcctggaagctcagtaggccagaaggctataattggttggtataatatcctcaaagaaaagcaactataaacttacaaatggtattcaacaaaactgccttttaggaacaaaattaaagacatttatcaatatataaataaatccaatgagttcactgccaggaggactgcatttaataaagtccgtaaggggcattctacttaacactacaacctgtcctccttctgcatcctccctaccatccacacacaagcacacctaatctcccgttctttgctctactttatattttttccataacatctcatcaccttctaaaatgatagaatgctcatatcatttacattgcccatctctctgacaagatgataggcttcatgaaggcaggaacctttgcatgttttatacactaacatatgccaagcacccagaaaagcccttgacacctcttaggcactcagtaaacacttgttgaatggatgaataaataaataaatgatatatttcatgaagaagggaaataaatgaaggaggacaagcagacacgcaacaagaaatgggtaagcaaacacaacggcaaacctgcatataaattaaaacacacagtgaaaccctgtctctactaaaaatacaaaacatgagccaggcatggcggtgtgtgcccatagtcccagctactcgggaggctgaggcaggagaattgcttgaacccgggaaacagaggttgcagtgagctgagattgtgccactgccctccagcctgggcgacagagcaagactccgtctccaaaaaaaaaaaaaaaaacttaaaaaataataatgtcttattgaatgtcatcagattggattttaaaatctggctagatgttatttatgagagataagcctaaagcataagtatatggaaaagttgaaagtaaaaggatggggaagaaaaaacgatacaccaagcagatatcaatccaaacaatgaaactatgttaacatcacacaaaataagtgttaagacagaaagcattaatagagatacagggctttacatgataaatgctgaaagcttagagtcaccaaggaaatacaatatttctaaatttgtatgtatttttaaaagcctcaaatttatgtaaagtaaaaacagagaaatcaacaaatcatactccacaatgaggtatttcaacatgtttctctcaattatgaagaggtcaagcaagaaaaatcagtaagaaatggacgtgaatagcatattaaaaagcttgattttatagcactgacagatctctgtacccaattttagaaaagaaagtttcttttcaggcacaaactgatcacacgttaaaccataaactaaatcattaacaaatttcaaaaaacaatatcaaacaatatactctctgactataatacaattaacttaggagtcaataaaagtagataaaatttggaaattaaaagattaaaaattcttctaaataatttatggatcaaataaatcaaaatggaaacaaaaaatacttaaaaatgaaaaacaaaaatgtagcatttcaaaacttgtgggatacagtaaaagtagtactaagagggaaatttatgtccaaaattttaacatcagaaaagaagaaaaaattaataagctaactatccaacaaaagaaattagaaagagaacaagacaaacacaaagaaaaagggggaaaaaaaccaaagaaaaaatgaaaaatcaatgaaggagatagatataaactttaaataaagagaccaaaaaaggcaaagttggttctgtgagaaaatacttgaatgaattcaatctgattggcaatcactttctctgtgtatcacctaaatctcagcaaaagcccatccctccagccttgtcctccaacactagcctcatctctctcaagtaataacagacgctagcatctctgcctcacttgtacttcatacagtgcaaatgtcactttccacccctaccctcatccccaccccacccacaccacacattaaagtactacatatcttcaagtgatgcaggctcaaataattccagaaaaagatttcttggccacgcacagtggctcacgcctgtaatccctacactttgggaggccaaggcaggcagattacttgaggtcaggagttcaagatcagtctggccaacatggagaaaccccatctctactaaaaatattttaaaaaatagccaggcacaatggcatgcacctgtagcccagctactcagaaggctgaggcaagagaatagcctgaaccttggaggtggaggctagagtgagccgagattgcgccactgcactccagcctgggtgacccagcgagactccatctcaaaaacaaagatttcttgaatcacttcccgaccaaacaggaggcccttgcgcctttcaacctctaatacacacatttctccacaatacaagaagaccataggctggcttgttacaggatctttattggcttatcttgcccctcatgcatctataagcaacaaagtatcataaaattaatattctttaattgaatctcatcaataactcaaactttgttccttctgaaactgcatcttgctcaatttggacatgtgatccaaactcagcttatctaaagcagttttctattacctaacatttctgattatttcatatttagatcttccctaatgtaccattttgcacatcactcttaaatgagtttgttcccaaaagcacatcctttaacaactgccgtgaaatatttggctggtccccataataaccaaaccaaaatccacacccatttctcgtaatatgggagtaatccttatttctggaagttttgcgtgccctttagtctattgttcaaaacaaacttctaagactaaaaccatcgaacattaagcctctcactttatctgtaaaaaaattgtatttcttgatattggtcccatattgctatattcagtgtttcctttttgaaaaaattctttactgccctcccatcctatgaggtcatttggtactggatcacacttttctcattttttactaattcagttctattttactccaaagtttcttgatttcctaaaagtgagaacaagcaatgcccatactacactttagctctaactttgtttttcccactggagagctggtcatccttcactgtaatcagtcaccactgtctgggaaatatattcaagagagaagaagagaaccaagatcatttggtagttttacttcatagaggcatgtgtatcatagtattaatacttcaaagacagaaacaacacaacatgctactaacataccgactaataggatatgaattcattactgggcagatttaaaaatacaaagctagacaagctaagaccttgctaattattaataaatagcaaagaaatctcctttataaatgcaggcaaccttttccaatttagttgtccaatttggctctttccaaaaacacctagctatggtctggacctctggtctttctttcattttagggcacatatttatcttctctggataaaattacactttctcttttaaatacgagagctctgccagcctttaaactgagtcttatagcagtggggagtaacagataaaggactggaaggtaacatggacaatctggattctattcctgtcaatgaaacaccataacagttgggatgggccacttaacttggatttaaattcaaccctttccagactgtagaaaaatatttaatgttgacttaatacagtaataagttaccttatttaacatgagattttttaagtacagcgtatctatgcatatcaccaaatggccatataattatgaatatacccacaaaaatagaaactgttattcaaaatcataaatacatgacgattaaagataagcatattgaaaagcaaaaagaaagaaatagtacctatatactctttatcctttcgttcctcaatagatcttattagaaagtaaagaactgagagagtaggaaaggagttaagtatattctaggatataaaatataacctaaattatgatagtgccatatcctagaaaatcgaatgtcattcaaattaatctcagtgatgttttcagagactctaaatacccaaagcctgtgtttagttcaaatagccacaaggatgggccattcatacatatttcaaaatattcccctcatttggtcagaagtacgataatacaaataaaagtagcatgatattcagggggactctagctatggtcataattcctctatggcctattttactttgctaaattctgcagacagtttaactttatcaactgacattcccccaccaggaattacaagctgcaaaaaccagcgtttggtttgaccagcaaagtgtagtttggtgttacacatttttttttaaaatatcttacaatggaacacacatggccagtcagccccactctcttctacttgtctacctctctagacctgtctcacacatttaggctgcctacctgcctggcacccctggcttctgagtttgaaaccactgtcctgcagaaaacctacggtgcaaccaaactcatccatttgcaggcctctgaacccaggacttttatctttctttctacccagacatataagtctgaccctttatccaacatccagcttaaattcctccaattccattaagactgccatgtgaaacttagcagagcttagagtgatttctccatccagttaattcctgtggctctcactgatgattttgttcttctaacacataccaaatggcatgatttctttttattgtttaattccttcggatcaaatacataaagggcagggactaggtgccatatcctctattcattctctaagatctatttaaaagcctgtacataaatagcattcaataaatgtttgctggtgataatgttgaggccaaaggttaaaaaaaaaaggactggaaaagaaaaattaaagactgcaagaagccatgacttctggtggaaaaaacaccaatcaaagcccatgcacttctccaaatgactagctggtagttcctcaagctacacaaactgatgaagcagtgaaaatagagcactgcctgtttcttgggctaataatccaaaaaggatattttacaaacctcaacacttcttcacagaaaagacaacaatgcttacaaaataaaaatgctcttagcacagccaaaaaaaggcacaatcacaagcttcataaacttgtctgagctcacaaggcaattcatatttccattctgtaagtcccctagcccccctggaaaatcacacatccaaaataaacatgtgctacaaaatagataggaattcttgtgatgagggtccattccttttcttggcggtgtggggaagacatggtctagaagttcatttgtaaacaggcagttttacctgcattaacaggaaaggcacttggtcaagtttctctagatgagcacgcccccttgtgggcacttcctgactcacctctttggaatggccagtggagattgtgggctgtttcaagctattatttttcaacattcatttccctcccttacttacatattatcttacatctctataatgttgagtgagcataataatattatttggtaatacttcagataacctatcccttttatttccccaaatacaagcttattgttaaaacaagcttagtttttagactaatgcatgtttgaagcccttaaataaaagattttaaacctattggaagactgcaaaatttactattaagaggaaatatcattatatgggttttctctttcaaaattaatattcaaatcatcagctgtagatgcttaaattagtaatgtcaactgagtaaaggcactatttctagagactgtgataaggataaagtaacaaaatgctcacgcttctatggacatacacaaacaaaataaccacatacaccaacctcaaaatggcaaatgtgtaaagcagataattcaattcaattaacacttattaagtacctgtcatctgtgccaactagaagaaagaaatttgatctgcatggcattggagctagctcataaaggaagagttgaattagaattttcaggaagcaaagaagtagttaatattccattattaattactgcttatcccattaagggaaggaatatgaacaaaaacttggatttgagaactctcagcaaataaaactgaaaagagaaatatatttggtgagaaaaaaaggtaattccagaaggaagataatggaaaagtagcttgtagctaggtttcaagagggtttataaaattcagcttaaaagtttgggttttaacccacagacagtaaagattctattaaagtttcttccaggagagagacaaaaccaatgcaggtatttttagggaaatgtatcttctgatagcacacagaattaaaacggaatagagcaggactagaggcaaagaagccaggcatgaagatactgcaacagtccagccactgagggtgaaaagacaaaggctcactggtagtatgtctactaaaaagaaacaagaaaaaaaaaagtagtgcatgtattcattaaatgtttattgagcatttattatatgtcaagctgagaaaccatggtaaataagacatacaatagctgtcctcctggaacctcattctactggaagataaagacatcaaataaccacactaataatgacagagagacaattggagcagcacaatagcttaaagagagagaagaaggaaggagacaggcaacattccctggatctggaatcacaggtgtgaagaccttgacacaggaagaatcttgacaatgtgacccggagtgagatggcaaaagattggaaagacagacagccatgtctgctcccatagggtcctggggactctgttggggagcctatactttattcttaagagcagctggaagtgagttaagggttcaagcaggagcatgacaaaatcaaactgtacttttagaaaacttcaagaatgctgggcagagaaatgactgaaagggcagggcagttgtgggcagataggtaggaagctagtgcaatcatccaggagagtgagtggagcatgattctaaacatgctgagttagactgtgatgggtcaaacaagtgaaaatgtgtaataggcaggagaaaacaggcaactggaacaggttgggacataaaaaaaaggaaatggaaaaatacatatagattcatccattcaaataaaccttcattaaatagctgctaatgtgtcaggtcctctgctgggcaggggaaaataaagagcaaggagcctgacttgagagaactggctgcctggtgaaggtttgactgtgaacaatgaaagtgaccctgaggcaaatcctggaagcaaagaggaagagctgcaactccaagaagggagttctagactacctggaggaaaactaaatgagtgatgctggacatgaagtcattaactgaattcaatcatataatcccagttcatctaaaatgttccatgtttatttatgcaatgggtgcttttctaagcccactgtgacatattaggaagaacaagcaatgatctcaaataccggcccaatagcttacccattcctgcagattatgattcggtatgtttaaagcagaacctaagaatctgtagttttaaaagtccccagatgaatctaatgatcagccaggtttaggatccactagaataaagaattccttaataagagaatcaaggaagtttggacatactccatgttgacaatgaatatgtattaagagtattacaccaagctaaaaaagaccatggtaattacctagttcaacatgctgacttaactgctgaggaaactaaagtctagagaggttccatgtttgcccaaagtctctggactggcttataatagatctagatacaactcttgaccctttatacactgtctctcaccttaccctattccctccactcctcaagtaattccagtctcaagtcttgaatttcaaatagttcctgggacccgactatgtatttaaaatattctaagctgattagagaagacacagctgaaccaaggctttaaaaagttacagataattttccatcaacctaattaagcactggttatttcttgtcttgtgatcttaaaatacccttgtacttgtaataggtgtgtgtgtgtgtgtatgtgtgtgtgtgtacacacacatttggtttttttaatgcactcatttattctgctgtcttattagctatacatgtgtcagcatcaccatgtctatgatagggcaaatcaggtcattggtgtatggtgatagcatatgatatcacatggagacatatttaaacttggaatgtgatgttcttaacaccagcatctaagccaatttccagatatgaaggcttctatctgtagtcccagtgagattccattcactggagatatttcctgataggaaagctacaaggtggtgacttgatattatacacaagatcagctgggactattccaatgataacattaagaaatgttccttttttccctctccattgattccgttaaatactacaaattttaagtctctacagagctattaaatactcaaaatttaggaagaatttacaaggccgacaatatctgatgtcaacttataacaaatattctgacaaaccacaggttacttccgttacaaaacaaaaacagtagttaagatttcttaacattgccttcttgcctcaatttcatcttacttataactttaagacttcatatagatttaaggtatagcttggtgtggatttaaggacgacctgggaagaaactcaatctcctaggtattgaatctttatatgctaagttagaagcttttcctaaatatggaatatatacacatacacacacacacacacacacacacacacacacacacacagagacactgcaattgtccagtcatcaaaggtcgaaagttttagactcagatattgatgattggcataaagtactataagctataaacatttagaagatcctcatatactgaaaacaaatgccaatcatcaggctttataacctaaataaatgtatgggatgggggtgatccaataagacattaattaagttactgacctatctactgatttacatgtaaaatctgtaggctcatccagtaatcaagatagtcttatgtgaggcaaatgtaattttcagtatattacctacaactaaaaaaaaaatttcaaataccagacaatcatttcacagaatgagttttcggttttatttttaaaaaatacataaagtaatctctttatgtaaaagataagtcaaagaagtttcctactttggtttactcatatattcatatactaatcaacttcttgagcaatatgacaaaactccagaccatgcaaagtcaatttctagagaagactaattactccttttcctgcactcttaatactctaagagtcccttccagtcacatccagggctggctgtttgaaacttatatttatggaatctagattatgccatgcattcactcagtttgtttttccagtgtcagggtctcctcttctggcaagcacagacaagtacaaatggaacaatctgaggaaaacatgttgttttttgtgcatttattttctttgatcttagcctacctctcacccaaaaactacaatgatttagtatgatacagttaagcatttacataataatttcaagatggtggataaaagggaaaaatgttacccacaatatacttcaaaagaatagaatatatttatatgaagggtacaaagcaaggcccaacatttcctttctgaaacatgtggccaatttgatgtccctatgtggtggctaaagaatacaaaattaaaagttgtagcatctctttagagtggttttgaacacacaacattgtatgaaagcaccaaaatcattgcaaaattttttaacttgtttattaaaaatcaaagaaggaaagatattcattcacacaatggaaaatgtctgattaactttcatttcactatcccatgtaagtactgctttacctaaacaccaatgaaattaattaaaaacttaaattactttgtaaaagtcatgggaggaggcaaataattatgtacattcaactgtaaaatctgttattaaagaaaaagagatggaaactatttcaacaatatgcttgtgaaaaatgaagagaaaggaaaaaaaaggcttgaaacatcaaaaatgttgagatcaaacaatacccccaacctcttttaatactctaagagtcccttccagtcatatccagggctggctgtttgaaactgatatttatgaaatctagattatgccatgcattcaatcagtttgttttcccaatacgagggtctcctcttttagcaagtaactctcagtcatgtagcaacccagtcagtcctgtagcataagccaagtacagcaattggccaatgagttaatgagttaaacacttcattccaaaagtaaggtttcctcttccaaataggataaagattagtaaacaatacaaccacttttttcttgtgtcaaaacaaagcaaacaataaatttaaaacaggtaatcacttcatcacatacaccacatgaacttactgataagtattccaacaatgagaggccatggcaattttgtaaggggagatccagatgtccatttgcagaaattatggaagatacaggaacatgctgaactttactgtgtgtatacaatgagcaaaactcagattgaaggaaacatcacaggacaaacagtccaggttatttgacagaaaaatagtccttgctttgcctaatatacataaatttcaattaccagagtttatttaaatcacaccagtccctcgacaacatggttcaaatttcaattaccatggtattattaactctgagtaactgcatgaaatataaactcccccgccatctccttggttcacaaaccactgcaaacatcagtgatgcacatcacgatcagtgaccaatcatgacattctttgaaagtctgtcagtgatgtgtcactgtgcaaagacagcaggtggaaacgttgcctctctgtctctaagtgatgaatttacagaagaaagtcaaggaaaaacaaaaacaaaacaaaacaaaagtgataatgctggaagtgaaattcaaatgaaagataaatgaagttatacgagaaataagtgaccacgggcatgtctgacactgctgccattaaggctctagatatacagacagaggaacttactaaagaggatcttatcaaggagtggagttgggacaaaaaggatgaagatgtcccagaggaagtgacattggcaaaaatttcacactaaaggaagactggcagctatgtggtgacactgaaagagcaaaaggtagaatgttgaaagctgatccaaaattagaaaggagtatgaaaattcaccaccacatagaaaagatgttcatatgacatcataagttacatgctgaggaggcaagtactgttcaaattataaatttttatcctaaataaaacactgttaatgtttctaaatgctttagtgtactaagtaaatattggttttacttttttctgtttccatacacatttataaccaacagtaaaagagatttctgggtttttctttctgtttttcttctttcctctttttgagacagagtcggggagacagagtctcactctgttgcccaggctggagtgcagtagcatgattatggctcactgtaacctcaaactcctgggctcaagctatcctcccacctcagcatcctgagtaacggggactacaggtgcatgccaccatgcccagccagtttttcttttgtatttacatatagagagacagggtcttgctatgttatccaggctggtctcgaaactcctagcctcaagtgatcctcttgcctcggcctcccaaagcactgggatgacaggtgtgagtcactgtactccaccaagagtttttaacgttttgacaaaaatatttaaaggtcatggaacaagctaaatttacaccattaagcccactctgcatggtttcagcttgcatggtcactttatggtccagccctaccatgcaaagtatggactgtctgtataccataaaaataagaaagagataaaagaaaaatccagaagagacaggtctacccagagagtgaagtagaacagaacttaaggactactatttttatttcacaatataatactacagctaaatagtcatctttttcttctccatcatgtcttccctctaaataacaaaaaaataagcaaggatgaaacaaagatgccaattaccaagaatggataattactaagaatttatgttcctcattttaaagtattttatcttaaaatctatacatcctaaaagcagagataaaatatgcttttattcaatttatgtatagactagctatttagctcaatattactttgtattaacaagggatatgttaattgtggggaaggagattataaaaacttatctccattaatgctatacactgtaaacgacctaccaaatagccactaccattgacaataaaactgctattttgtttgggaagacaatgtgtctatcctcaagccatgaactatgagatggtaattatgacaactcacccaatttcctaggctcctttgcagctggaaatagccatgtgactgaattgtgccccttctcaactactaaggagaagtttattgagggagattccagaaaaattttgaatcccagataaaaaaggaaaatacatctggcacttctccctctttgccatcctgccttactctcactttgaatgcagatgtgacatctaaaatttcaggagccatatcacatccatgaggcaaaggtataagaaaaaggcccaagagaataccagatatgttagccctagcatcatcagaaacctaaactaatgccagcaaccaaccacctccaaacttattactatgtggctacgggccagagagcaaggggacaaatatgcatttcttaaaccacagtcaggttttccattgtttgcagccaaaagcattccatggattaataattcttactttaaactaatcaaatgtaagtataaacggtcaaagactaaagaaaacaagagcgctctaatttatagaggtagaataccaagcagaataaagtcttctggctttaatttgtatttctacttgtactgtgataatgtttgtataatcgattactttaaaagaaaaaaaatcaatgcaataaaaaaatcccaaatttatctagtttttttttcacactttaaattacaggcataacttggaaatagtgcaggtttcgttccagaccaccacaatagagcaaatattacaataaagtgagtcaaataaatattttggtttccgagtgcacataaaagttatgtttacactttactgtagtctattaagtgtataatagcattatgtttaaaaaaatatgcataccttaactttaaaataatttattgctaaaaaatgttactcatctgaaccttcagcaagcaattcataatcttttggctggtgaagggccttgcctcaatgttgatggctgctgactaatcagggtggcagttgctcatacatgagatggctgtggcaacttcttaaaacaaactaataaggaagtttatcacattgaatgacccttcctttcaccaaagatttctctgtagtacatgatgttacttgacagcattttacccacagaacttctttcaaaactggattcaactctcaaaccctgccgttgctttattaataagctcacctaatattttaaatcctggctgggcacggtggctcatgcctgtaatcccagcactttgggagaccaaggtgggtggatcacctgaggtcaggagttccagaccagcctggccaacatggtgaaaccccatctctactaaaaatacaaaaattagccaggcgtggtggcgggcgcctgtagtctcagctgctcaggaggctgaggcaggagaattgcttgaacctgtgaggcggaggttgcagtgagccaagatcgtgccactgcactccagcctgagcaacagatcaagactccctctaaaaaaaaaaaaaaaaaaaaaaaattataaatcctttctcatttcaaccatactttcagcatcttcatccagagtagattccatctaaataaatcactttttttatttatccacaagcagcaactcttcacctgtaaagttctatcatgagattgtagcaattcaagccacatcttcaggccctacctctaattctagttctcttgctacttccaccacatccacagcgacttcctccactgaagtcctgaatccctcaaagtcatccatgaggcttggaatccatttcttccaaatgcctatgaatgttgatattttgactttctcccatgaatcacgaatatacacaatggcatctagaatagtgagtcctttccagaaggttttcaattcaccttgtccagatccatcagaggaatcactatctatggcagccttagccttacaaaatgtctttcttaagcaataaagacttgaaaatcgaaattaccccttgattcacagcaagcataatgaggatcttggtggcatataattcaaatgaaagaaacagaggcagatggtacaccaaaaggtattctattagctttgggtgtttaaggggctattggcatcaagtaataggttttatggtgaaaatggaaagcattggtcaatctgagcccattaagttggagatgggttaagaaagttactgatttccactgcctacttctaccaccagaaagccccatttccccagctctactcttttagtaaatggcaaatatccaactgctcagctaaaacccttaaatcctctgctcagctaaaactcttaattcctctctctttcttgccaataactattggcatcaatattgtctttccagaaaccctcaaaatattttctggatatattcacttatcgtcatctccatccctatcacctacagtccaaggtgccataatctccaaactgcaatgactttgtaactagtctcccaacttctactcttacctcccccttggactgattattcacatagtagcccatggagaactttgcaaaatgtgaataagaaagcactgtttccctactttaaactcttcaatggctagccattattcttgaataaaattcaagaataaaataaataaaattcttgaataaaattattgaataaaattcaaactccttgccatgatctaccaggtcctaaaggagctagcccataccaactgctccagcttcatctcatactattctccccttgctcactgatttggcacactgactctctctctccattcctgtaatgtgccaaactcccacagggcctctgcacatgcagctcattctgcctggaacactcttccactgagtcttcataaaagccactcattttttagatgtcacctcaaatgttatctcctcataggggtctccgttgaccatcctatttaacaaagtcttcattcagactctcacatccaagttactctatatcacatcattttgttcttctttttttccttcataacagttacaagaataactatcttaattatatgctaatatgtctctttctcctaaaatgtaaggtctcattagagcatgagcttcctccatcttgttcaccattattttcttactacccagttcagtcccatttcctgaatggaaaactgaactacttgagtaattccagctgaagatattctccatgagatgcagtgaaactcctatatataaaaatcctaacctgatctccacaaaaagaatggtatgagaatttcacagcagctttattcgtaatagtaaaaaactggaaaaaaaatcaaatgtccatcaacaggaaaacggataaacaaattaatgtgtatttatattaggaaatattaatcagtaataaaaaagaataaatcggtgatacaatgtctaataaaagctttctgtgaaagaagccaaacagaaaagagtacattctgtatgattccatttatataacgttcagagcaagaaaaagcatttactgtaataaaaatcaggacagtggctgcctttaagttggagactaactggaaagcagcatgaaagaactggaaatattctatatcttgataggtgtatggtttacatgggcatatatgtttataaaaactgattaaatcatttactctatgcaaattttattacgatgtttttggttttttttttttttttttttttttttgagacagggtctcactccatcacccaggctagagcacagtgacatgatcacggctcactgcagccttgacaccccagactcaggtgattctcctacctcagcctcccgagtagctgagagtacaggtatgcaccaccatatccagctaaatttttgtacagatggggttttccttgttgcccatgatggtctcaactcctgagctctagtaatccacccacctcagcctcccaaagtactgtgatttacaggcatgagccactgcacctggcctatcatgaatttttaaaaaggcaaaaaagtcctaaattcattcacccacacatcacatccgatgcagaaacccaagaaatagactatccaccatcatatcaagatctacttattaatttgttcatctgccttctaaattcttatcctttgccggcagaaaattaaaaaggtttgtaccaaactgattatctcgtggcaacacaccaagaaaatatctatcactacaaaagatgatgtattgtgcattcatacataggtaaaccatataaaactatgacacaaaggacaaaacagtatctaagccattacagaagaactaaacaataaagaatattgatgaatgctaaggtacatcacatgactatgtgacctgggacacccatcatgagctgtatgctaagaaacccctaagccacaggctgagcaagaatgttgtagttttcaatttctttctatccctaaaaacgcctgaatacaatatgtatattttcttatacttacactctactccctaaacagtcatgttaagaatcactatcaggagctgtaagaaccaaaacagtagccacgagccaaatgtagctattcagaaattaaaatgagtcaaggacaaatggaaagctgaatttttaattttataaaattttaattttctaatatattaaactattaggaagatttaagtatacctgtaataacttggtatgtaaatttactatttcacagtaaatttttatgaaatataaatacagatcaaatatatctaataaaaatttagtgttataattgagatgtggaaaactcaaactggttctgaagacttaatactaaaaacgataatgtaaaatagctcattaataatttttccctgatcatatttcaaagttatattttagatccactggtttaaataaaatatattaaaattaatttcccttgtttctttctactttctttttctcttttatgagcctaatattatgaacatatttttaatgtagctactgaaaaactttaaagtacatatgtgacacacattctatttctactgaattgtatcgtcctaaagcttgtatctaaatgcagaagatatatcatctgatacattaatttgaatatttcaaacaccacctgaccttctcacttgattgtcttcttttctttagttgcataaaatctgtgtccaccctttctgccagctctagtttcctcttgtttcttttaaatgcagctaaactgaatcctataaaataaaaataaaaaacattaaatataacatttaagaaatattagggcaatgggtcaaataagatatctgaagagccttcccagaagaaaatccttcagtatgttaaattaagggtttaaaaagtcttttcaatgtatacagggatagtaggagaataagagaaataaattaagattttaaaattaagaaaatggtccaacccagagaaacaaaggagtcctgaaggcagatactaccctcagggcatctgttgatgcaagcctcctccaactgtcgttttaaaggtctctgcgcaaaggaggtaagagacgaaacttgggcacaatgcagtatgagaaaacacactggagattatccacaaagaaaggagaaagtctcaatggttgatattcccagtgaatgggcaaatgagaaaaaagccaccaggcaccaaaaaataataaaaagtaaataaaacattttttaaaccagaaaacttgcaaatctcagctttggttctagatgtaaagaggaaacatctccctagaaatttcaggactaatgcgggcatttagatagacctcgagtagaattcttattacctgtgagatcccagggtaaaaaagtgatcaacagtgcttcaaagggcctccaaacacaaatgcaaatactccccagaaaaacaaactggccttaacttacccagacctcaaagaactcccatgtttcaatcaacatgtgctcatagttttaaaaggaaaattcataaaacacataagagataaactaccaagaataaaagccagccgaatatcagaaagcataacctgacctgcaaaaatctcagatactggaataatcagatacagaatataacacacgtttatgctcagagaaagaaaagaaagacatcaaaaacaggattaagcagcaagatgataaactgactaggctgaattgaagaacaaatagagcttcaatcaatcaataaaataatcaaaattttaaaacttgatatacaaattttaacagccaattagatccagctgataagagaaattacaaactggaacataacactgacaaagttattgaagttttctgataatggcagactaagttattcagagtaattatccacagaatattcctaaaaacattgggtaaaatatttaaaataccaccttaaaagcattcaaaaccttacaagcactaagctaaattcttgggtaaactgaggactaaaggtattattgcactgtgaacatttgccaacactagcacacttgcattcgactaaatggcatcaaggagagggatacgtcaagcccaaagcccattaagagtacagagttttataggagacattccccacaataaactgggaatttaaagggctaattctcttagagtaaagctaatccataactgagtccattactccctctatctcaaaagcaaatgcatgcaggcaatattgtcccagattacagcagagcatgagaccgacagaaggtggggggaaaaaacagggagaaggtagagaaaaagaaagaacaaagtattcgaaagaggtggggaaagaaaactatctctgagaaacttttggtctcatggggcccttgcatagatttacaaatatacacactgtacagtcccagaaggaaaagaaagagagaaagagaagatggttacttgaagaaataatagctgaaaacttgccaaatttgatgaaagatatgaacacccaagatataaacacccaagaagctcaaggaactccaagtaggaaaactgagagatccataccaaggcacattataatcaaattgtcaaaggccaaagacaaagagagaatcttgaaaagcagattatcacctactagggatccccaataatattataagcagatttctcatcagaaactttggaagccagaaacagtgggttgatatattcaaagtgctgaaacaacaaaagcatcaaccaagaaccctggaagtggccaaacgatccttcaaaaatgaggggcaaattaaaatactctcaggtaaacaaaaactgagatagttcatttttactggacctaccctgcaagaaatgctgaaggaaatccttccggttaaaatgaaagaaccttagacagaactcaaacctgtaaataaataatgatctctgataaagataagtacatggacaactgtaaaagctagtcttactgtaattttggtttctaactatgctttttgttttccacgtgattttattttatttatttatttttgagacagagtctccctctgtcgcccaagctggagtacagtggcacaatctggactcactacaacccctgcctcccaggttcaagcaattcacttgcctcggcctcccaagtagcggggattacaggcacgtgccaccacgcctggctaattttttgtatttttagtaaagacagggtttcaccatgtcggccagactcgtctcaaactcctgagctcaggtgattcgcccgcatcagcctcccaaagtgctggaattacaggtatgagccaccatgcctagcttattttctacatgatttaagaaattaaagcattaaaacactatcagtctgttttgagacagacaatgggaaaagatacaattttgcaaaagagggttgagacagagctgtataagaacagaatttttatttgttattgaagttaagctggtctaaattcaaattagagtgttataattttagaatgttaaatgtaatccccattgtaaccacaaaaaaaaatagcaagacaatatacacaaaagaaaatgaaaagagaacacaataaaccaagtagatctaaaagatataaacagaacactatattcgacaacagaattcacattcttctcaagttcacttgggacatttttccaaaatgtcccatttgtgtgtgagcacaaatcaaatctcaatagattgtaaaagataggtattgtacaatgtatcttctccaactacaacaggatggagttagaaatcaatggtagaagaaaactggaaaatgcacaaattgtgaaaactaaaatacagaaagaaatcacaaaggaatcagaaaatcctcagataagaataaaaattaatacaccaaaacttacaaagtacatcaaaagccttatgaagggaaaattttatggctataaacacattaaaaaataagaaagatttcaaacaacaacctagctttaaaacttaagggactagtaaaagaagaattaaacccaaagctagcagaacaagggaaataaagatcagagtggagataaataaaatagataataccaaaaaaatagagaaaaacaaataaaaccaaaagttagttcatggaaaacattaacaaaatttaaatctttagctagattaactaagaaaaaaaaagacaaattactataatcagaaatcaaagtggggacattactactgattcttcaaaaataaaaagtattataggccaggcacagtggctcatgcctgtaatcccagcactttgggaaaccaatgtgggtgaatcacttgaatacaggagttcgagaccagcctgggcaacatggtgaaaccctgtctctataaaaaatacaaaaattagccaggcatggtggcatgcacctgtagtcccagctactccagcagctgagatgggagaatcatcttagtctgggcagtcaaggttgcagtgagccatgtttgcgccactgcactccagcctggtcaagagcaagaccttgtctcaaaaaaaaaaaaaaaattatatctctatatacatatatatatgtgtgtgtgtgtgtgtgtgtgtgtgtgtgtgttgtgtatgtgtatacgtgcgtatgtatgtgtgtgtatatacacatatatacacacacataggtgtatatatacacacacatacatacgcacgtatacacatacacaacacacacacacatatatatgtatatagagatataatttttttgagacaatgtatatatgcatatatatgtacacacacatataaataagagagttctatgaaaaattgtgtacccaaatattgaatggcctaaatgaaattaacaaagtccaataacacaaaacctacaagactgcatcatgaagaaatagaaaatttaaattaaccaataactagtaaggagattgaatcaataatccaaactctcccggcaaaaaaaaaattcccagacttcatgacttcactggagcattctaccaaacatttaaacaacaaacaccaaaaacattaacgaagaggaaacgcttccaaagtcattctatgaggccagcactatcctaataccaaaaccatacaaagacaccataagaaagctatcaaccaataccccttatgaacgttgatgcaaaattcctcaacaaaatactgccaaaccaaatgcagcagcatattaaaaggataatacactatgacaaagtgcaatttattcctaagaagcaaaggtcgttcaacatatgaaaatcaatgttatacaccaacattaacaggatgaagggaaaaagccatatgatctttttttttttttttttaacagagacagggcctcactatgttgcccaggctggtcttgaacttctggcctcaagtgatcctcccgcctcagcctcccaaagtgctgggattataggcaagagccactccacccagcatgatcataaattgatgcacaaataatcatgttataaaattcaaaattctttcatagtaaaaacaccaaaccagaaatagaaagaaactacttcaacataaaaaggcaaaatatgaaaagcccacaactaacatcatatctatggtgaaagactgaaagcttttcccctaaaatcagaaacatgacaaggatatgtacttttaccacttctagtactagaagtccaaacctaatattagaagtactagaactagaagtcctagaagtactggaagtcctagccaaggcaattaggcaaggaaaagaggtaaaaggcattcaaattggaaaggaggaaattatacttgatcttatacttggaacatcctaaagatctccaaccccgtcccccaacacaaacacacaaacccactagaactaataaattcagcaaagttgtatgatacaaaatcaacactcaaaaatcagttgcatttctataaattaacaatgaacaatttaaaaagaaattaagaaagcaatcccatttacaatagcatcgaaaagtataaaatgcttagaaaaaaactaaaatcaaggaggcaaaatacttgtatgctgaaaactacaaaacattgctgaaagaaattaaagacgttaataatgaaaagacacccaggttcatgaattggaagctttaatattgttaagatgtcagtactactaaaagcaatctacagattcagtgtaatccctaacaaaatcccaatagtgtttttttttttttaagaaatagaaatatcaatcctaaaattcatgtacaatctaaagggaccctaaataatcaaaacaatcttggaaacaaaaaaaaagttggaagtctcacttcctaatttcaaaacttactgcaaagctacagcaatcaaaacagtatggaggctgggcgtggtggctcacacctgtaatcccagcactttggaggccgaggcaggcaaatcatttgaagtcaggagttcaaaaccagcctggccagcatggtgaaacctcatctctactaaaaatacaaaaaaaaaattagccgggtgtggtggtgggcacttgtaatcccaactacacaggaggctgtggcaggagaattgtttgagcccgggaagcggaggttgcagtgagcagaggatcgcaccattgcactccagcctgggcaacagagtaagactccatctcaaaaaaaaaaaaaaaaaaatatggaaatggcataaaggccattacacagaaaaatgcaatagattaaagagttcaaaaataaactctcacatatatggtcaacgatttgacgagggtactagcaccattcaatagggaaacaacagtcttcaacaaactgtgtttgaaagattagacaaccacatgcaaaggaatgtagttagacccccactttataccatataaaaaaattaattcaaaatggatcaaagacctaagtgtaagagctaaaactataaatctcttagaaaacaacataggggaaaggttggatataacaccaaaacacagacaataaaagaaaaaaatagataaaaatttaaaagacacaatggagtgaaagacacaatcaatggagtgaaaaggcaactcgtggaatgggataagatatttgcaagtcatatcggataagtgttaacatccagaacatatgaagaattcctatatctcaacaagaaaaaccctgattgaaaaataggcaaaggactaggatatatatttctctaagaaagatataaaaatggccaataagcacataaaaagacactttaacagcataatcattatggaaatgcaaatcaaaatcacaatgaaataccaactcacagccattaggatgccaactattttttaaaaagtaaaggaaagaacaagtattggtaagggtatggagaaactggaaccctggtgcactgttgatagaacatgaaatggtgcagccactatggaaaacagacaatatggtggcttctcagaaaataaaaatagaataaccatgtgatccagcaattccatttcggggtacccaaaaaaaatggacagcagggactcaaacagatatttgcatagccatgttcacagtagcattatgcatgacaaccaaaaggtagtgtaacccacgtattcatcagtggatgagtagataaacaaaatgtggtatatacatacaatgaaacactattcagccttaaaaagaaattctgacacatgctacaacatggatgaaccttgaagaagtcatgctaagtgaaataagccaattacaaaaggacaagtactctatgattccacttataaaagcagaattcatagagacaaaaatgaactagccagggactaaatggaaggcacatggggagttactgcttaatgggtacagctttggtgttacgagatgaagagggttctatagttgatggtactgttagttccataacaataagaaaatatttaaagctactgaactataccattaaaaatatttaagatggtaaattttatgttatgtgtattttaccataattttaaaaagaactacaaaaaaagtacaagaatgtttacagaagctttattcataatagccaaaaattggaaacaacccagacataaatgggtaaatggctaaacagtagtagtacctccataccatgaatactcaggaatgaaaaaaaaacaagctattgataaacacaacctggatgttatctccagagagttatagtgaggaaggaaaaaaaaaaaagcaaataccaaaaggttacagtctgtatgataccatttatattacattcttgaaatgacaaaattatacaaatgtaaaatatattagtggctatcggggttaaggtgggaaagaagataacatcactgattattagagaactgcaaatcaaaaccacaatgagatactatctcacaccagtcagaatggctattattaaaaagtcaaaagataagacactggtgaggttgcggagaaaaagtgcttacacactgctggtggaagtgtaaattagttcagccattgtggaaagcagtgtggtaattcatcaaagagctaaaaacagaactaccatttgacctagcaaccccgttactgagtatatacccaaaggaatacaagttgttctgtcataaagacacatgcatgcatctgttcactgcagcactattcacaacagcaaatacatggaatcaacctaaatgcccatcaatggtagactggataaagaaaatatggtacatatacaccatggaatactatgcagccataaaaaagagtaagatcatgtctttagcacgagcatggatggagatggccattatccttagcaaactaacacaggaacaaaaaataccgcatgctctcacttataagtgggagccaaatgatggaaacacatggacacacagagaggaacaaaagacagtggagcctaactgagggtgaagggtgggaggggggaaaaggatcaggaaaaataactaaagggcacttagcttaatacctgggtgactaaatagtctgtacaacaaacccctgtgacatgagtttacctatataacaaacctgtacatgtgcccctaaaattaaaagtgtttaaaaaataggtattcggaaaataaaatacagaaaatgtgaaggaagaaattatcccaaaattttcttttaatttctccaaatctgaagcatataaatgtccagacttaatgtgcaaaatgagcactcaacataaagaattaaaaaaaaaatgccccaagatgcttcattgtgatcatcaaaacatgggaattaagagcttccttccaaagagaaaaaaatacaccacaatatttgtgagtcttgcataataatagcaagactggaaaccagatgataagagaacaatttcctcaaaaacctaagggaaactgattttcagtctcgtatgtactgaataaggaataaaacaaggaagaaaaacacatgagatccaggaaacagagaacctgatactggagagaggcgaaggagatcacaaggtgaagcaaggcacagtccaggatggcagccacacagcagacctagtaagactcgagactggaaggggccaggtggcctgtctccaagggaaaaaaagggaactgacagatgacctaatttgtttgcctgatataaggactgtaaaataagttccattggaaagactgtaagacataattagtgacagggatcatgggaatttaaaactctcatatttcagccctactgctacacacacatttctcttccctctagcctccctatattacaactttcagcattacatgaatattcattctgaatataatttttttttagacacaaggtctcgctctgtcacacaaactggaatacagtggtgcaatcatagcccactgcagcctcaaactcctaagctcaaaggattctcctgcctcaacctcccaagtagctgagagtacaggagtgcacgaccacacctggctaattataccctatttaactaagttggtttccttggagttaatcctcactttttcatttgattatttaaattatattcacagatttcagtgataaaaataaaatttttatttaaaaaatagtgtttttaatatttctttctcattttatgcaaatatttttaaacagacatatacacaaacatatacatatttataacttcatttttcactcttttaaagtcattagattcaatcattatcagagattagtcttcataacaatttctagttacttcataacatttcattataagaatatatgatcatttatttactcatattcctgtgttgggtataagatttttttcaaaattttgtatattcttaataatgctcacttgagcacccttctacataaatctttgtctatctccagtgacaggttcccagaagcagaacaaggcttttaaagctttttatctgtactacttagttgtcctctaaaatctctgccaattcacatttatacttacaatgtactatgattatttaaccaaacacttaccaggagtaatatgttttaaatctttcaaaagttaaaagggaacaaatttaacatgtactcattttaatttgaatttgcctgtcagttatgttatattatctacttaggacttttgatcatttttatattgggcaattacttgtatttgtgttgtttttaatttggtaaatttcttcatagattaaggatatttatccctttgtcatatttgtgataactgtttttcagtttaactctatgtagtcacacctttgtttttccttcccttgcatttgtatctaaaaagtccttccctcagctcaaggactgttaaatattgacctatattttcttctctctctctctctccatctctctctctcattgaagggtggtattaatgctttattagtagtaattattttaagtaatctctaaaagggatcttttagtaatacttttataaaagcataaggaagcagtgagaagacctcaggaatacaaaggtggtttaaaatgaaataactttctacgtagcttttaactacaaatctttcaacatataagtattcttccataaatatctgtactacatgggtcataacagaagcaatattatactttaggtatatatgctcatatagcttaattttttttaagtttttactcacttgtggtcatgatgttaggagggcaagagggtattccatgatctactgcccatctgtaggctccttctccaactaaaaagctaacaacagaaaaattatttttaaaattcacagtgtcatcttctcctacatattcaataaatataggtaatatggtaaggcagttgagaaaaagtcttgcatatggacataattccagatttacctcaaagtagtaagatgactgcatgctaaaaaattcctgaaaatttttctccaaattagaaattttacaattggaatgttacaataccatttgcaataactaactagtaaaaattggcaaactcaaacataataagatgtaaaaatggttgacttctcagtagaaaacattaagatttatcttggaccaacagggttctcagttaatgtcacaagattggttactcaaattaacagtttacaattaagtgaatgccttcagatttggcattattacctagcagaatacctggatccatccaaaattagtgggtacatctggagatgcccaaatatatatgcttacatttctaagccctgatgcaacgaaaatacatacataaccttcagaatcacttttactgtggtaagtactatggtatgtcccaaaagtaacttttaagtcctaaatagcaagttttaatataacaaagtggataaaaggatattgctagctaaatataaaagacttgttttcaaagatttcaaatagcatgtaggataattaccccattccctaagtaatttgactaagcaaatagtaatagcaagcagttaccataataattaatcactccatcttcttccatagccaacttcttaaagatctcagccagctagtaatggattccttgaacttgtgcctacttgctagttttccactccctatttttttgtttctgttattttaatcattccaacattaaaaactcgaagtaacacatattgaagtcttaagatttgactgctaataagaccagtgacagactggcaaaacaaaatctaagtagaccctcagaaacatatccaaatggttccaatgggaaaccaaatggttaatctcaataactgctttctaatatacataaagatggggatggagggactattttaaatagagaggagagaaggccaatgagaataaacaactttacctcttcaaaattctactttaaaaaaaaaattctaaaggattctaagaatagaaaacagtttttcctattcttgtacgaaatgaaatcctctccaaagaaaagccgtcacataaacttcaaatgttaagatgactgaaataggagcttggacgcaaatttgaactgtcctgatggcatttttagcatttccttcttctaggaaaaaaaaactgataaaagaaataattctgttcatgagaagatgtaaaagagaagttgaagtagtaaactacatgatcaagacaaaagtttggagttaatctaatattctcagcactcccattggtcactttgggttcaattccagtatctggaatcagtgaggggcattttacaaaatattcttagctttattttatatattttttaatcattcgaaggtttgattctaagtaaaatcaatttgctattgtcaactatttaagtttttaaatacttcgggcactgtaaaatattcataggaaggcaaatagttggatgtcatcttatggataaggatactaactatctaccctttcctcaacataaaaaagtattgtatagtaggtcatcatcacacaaaatatcatataattgcttttgaaatcattttagcagaagcttttactaaaaactatactgacatgtcaaaaaaatcacatttctaaacattgaatgcagcaccgattcaaatttctctcaagcattcttctgattctccgaggaggaaacttttagaaaaggttcacgccaatctacttcaaagtcccattgactctacctttataacatatctggaatctgaccacttctcaccacctccactgctaccaccttggtctgagccaccatcatctgatacctacaatgctgcagtggccccactatttttatgcttgccttgccctgtattccctgacctcagtcaattctcaatacaccagccactaaaatccttgtaaaatacaagtcaggtaatggcactcctctttcaaaatcctgtaaaacctcttgtgaggaccagtgtaaaaactagggtctttttaaaaatctacaagctcccatggaatctgatccttaccgctccccagttcatctcttattgctcttacctccttgtgtactctactcattgtcgtgtaaagccacaaacataccaaggaggctccagcctcagggtcttcaccctgaatgttccctctgtctggctctttccctatttcccaaatgggaaattccttcacatgctcaaatatccctccttcatgaggcttccttaaaaatgcatcccactaccctgcactcctctacccagtactcacaatctccttatcctgctccttttaccttcttccaccttctaacatattacataattgataatttacacattgtatctgttagtttatttctgtataaagtccttaaaagcttcgagcttcataagggtggagatcttcgtttcttcatcaacatatctcaagcatttagaacagtgcctaaagcatactaaacattaaataaaaattgtcaagatattaaacaaaataatagagtgtcaaacttctctagattaaaggacagcattttccttgtgttatacccatcttcgtttacattaaagcagatctaaatggttacaaaacaaaaagcaacactctactgaaaccaccacggaggtgaggtaattaaaactctcagctggacgcagtggctcacacctgcaatcccaacactttgggaggccgaggcaagtggatcacttgaggtcaggagtttgagaccagcctggccaacatggtgaaaccctgtctttaccaaaactataaaaaaatatgccgggtgtgatggcacgcacctgtaatcccagctactcgggaggctgaggcaggagaaccgcttgaactcgggaggtggaggttgcagtgagccaagatcgtgccactgcactccagtctaggtgacagagtgagactccatctcaaaaaaaaaaaaaaaaaaaactctcaagaactgagctgcaagtgctgacagagaaaacaccctgaaacggactatctgggcaaatacggtgataggaattacaatctcatggatgtactcatgtgaattacaatctcgtggatgttctcatggatgcgaacctcccattttcaaagaatcatgactataatcagtctaaaatgtgtaatttagtggttcagaaagcgctcaaggatcttcaggaacccccgtaatcaaaatacattgttttcaaagagaaagatatgggagaacataactaattctctggactcaagaactgatttccattttatctatgacttctttactcttcataaatacaaaaaactgaagaaagataacttcggttattgattatttaaagcttatcaacacataaaatgcaaataaagaaaaacttgctatacttggaaataacacataacaaccaaattataactgttctcttttggactctgttttaatttttttattattgaaatgttctaacatatacaactgtgttcccccaaaattcatagtttgaaacctcacccccaaggtattgggattgcattaggaggtggggccttttgggaggtgattaggtcatgagggtgaagccctcttgaatgggattagccctcttgaatgccccctttaatgggacactgaatcccccagctccttgatcttgaacttcccagccttcaggactgtgagaaacttgtattgtttataagctaactagtttatgatattaaggtgttttgttatagtagaaactctctagagttcactgtctaaatgtaatatagttttaaaaaattccctgagtaccctaaatcaacataaccaaatttatcatgtttttactttgagcttatttacatgtgatccaaatatttctagtcatctaatttctattataatctagaaagtgaacttccaggtatgtgagagatttttcacttctggacaagatggagtaacagggaacaaagttaccctcttatttgaagtggtgaaaaaaacaaaagacaaaatatagaaaataacagttttcagacgttaagacattaggcataggacagtaatccttgagagaaaggaaaacaaggtaaaccttgtgactgccttactgcaatcatagagttcaccttcattactgcctagagagtttctaaaccacagcacagcagctccagcaatatctctgagttgaagtgacatagtcgggcatccagagaggccatgtagccagagttcacaataccagagaggagaaagctgcatatagagagtacgctagagatctgcagagagtatccctctaagcttcagctaagtagagatcagtgaatgtgtaagaagaaattacccaaagcactggaacaaatgaaatgaaagtttaaaaaaaaaaaaagaaacaaagtccccaagttcagacagccaggaacaacagctcctgctcccaccagccaaagtaaaggcctcattctaggtgcatctgttataatactttgaaagattctacctcaatagcaaggcaaaattagctcaaggccaaatgcttttcgtctcatgtaagtttaaagcgagacctgaaaggctcaagctgtttttaagtaacttagccacatcctagaataaaatgtaagaatagtttttaaaatacaaaaatacacagcacccaaaaaggtaaaactcacaatgtctgaaacccaataaaaattaccaagtatgcaaaataggaagaaaggtaacctattatgaggtgaaaaatcattcaatcgaaaacaatccataaataacaaagataacagaattagcaaacaaagatatttaaatagttgttataacactattcatatgttcaggaagctagaggaaagtttaaccatgttaagtagatacatggaagacattttttaaagatgcaaatcaaacttgtagagataaaaataacaatacataaagaaataaaacacaagctgaatgggattagcaggtaattagacattaagtgattagacagaaaaataattagtaaacttgaagatagcaatagaaactattcaaaatgaaacaaagagagaaaaaacaatgaaaaaagtaaacaaatcatgagtgatctgtaaactactacaagaggctgaaattacatgtaatcagaattctgaatagaagagacagggattcagaaaaaaatatctgaaaagataatgaggaatttttttcccaaagttgatgaaatatatatccccacacatccaaaaagcaaaaggaacccaaaccaaagttattacaagaaaactataaaccagtatcactcataaacatatatgtaaaaattctttaccaaatattagcaaactgaagccaacaatatataaaaaggataatatattatgaccaagtagaatttatcccaggaatgcaagtgctgctttgtcagtcaaaaatcaaagaatcactaaattagctaactaaattttttaaattataagatcatctcaatagatgcagcaaagcatttgacaaagtacaatacctattcctactaaagttctcagcacactaagtgatatggtttggctgtgtccccacccaaatcttatattgaattgtagctcccataatacccatgtgtcatgggagggacccagtgggatataactgaatcatgggagcaggtttttcccgtgctgttcttgtgagtaaatctcatgagctttgacagttttataaagggtagttcctctgcacacgttgtcttgcctgccatcatgtaatgtaagagggacttttgctcctccttcaccttttgccatgattgtgaggcttcgccagccatgtcgaactgtgagtccattaaacctctttttttaataaattacccagtcctgggtattagttcatagcagtataaaaatgaggtaatacattaggaaaagaaaggaactttctcaatatgatcaagagcatctgtgattaacctacagcaatcatcttacttaatggtgaaagaccaaatgcttcttccttaatatcacaaagaagggaatgatgtccactctcacacttctctaccatataccgcattggaggttccagacaatgcaataaagcatgaaaaaaattagttaaaagaatccaggttagaaatagaaataaaactatattcattcccaggagacataatatttatgtaaaaaatcttagctgggcacggtggctcacatctgtaatcccagcactgtgggaggctgaggtgggcggatcacctgtggtcaggtgttcgagatcagcctggccaacccctcctctactaaaaatacaaaaattagcagggcatggtggtgcatgcctgtaatcctagctactcaggaggctgaggcaggagaatcgcttgaacctaggaagcagagactgcagcgagccgagatcatgccattgcactccagcctgggcaacagagcaagattccgagacagaagggggaggggaggggaggggaggggaggggagcggagggaagggaagataagagaagagaaaggaagggaagagaagagaaaggaagggaaggagagagagagagagagaaagaaagaaaagagaaagaaagaaaggaagaaagaaagaaagaaagaaagaaagaaagaaagaaagaaagaaagaaagaaagtcagtcttatggaatctataaaaatgggactaaaacaaatggatttaccaaattcccatgatagaatgtcaatatgttaaaatcaatcacatttctatatactgacaatgaacagttggaaattaacatgcttaatttccatttaccacagcatcaaaaaaaagtgaagtaccaggtataaatataataaaagctgtgcaagatctatacactggaaactataaaacagttgggagcgtttaaaaatcttaataaatgcatatattagaatcacaatcaaaattctggcaggctatttacagaaatggaaaaacaaattctaaaattcatatgaaaatgttaaatacctataatatcagaacaatcaaacataaagttgaaaactatgtttgtgagaaaaccagctagttccagacaagtgtagcattattatataattttaataaagacgcagccatcactttctcccatatgttttctctttgtaaaatattaaaatattgcatatgtcccctttgacaattgcctcatcttactccctcttcccctgaggtaatcacagtggctttagtaacctactttacaagtcatttttgtacatctatgcacatatttatgtagccaaagaaaattagagtattgtatatgctgtaataatatgaaagaatacgtggcaatgagaaaatcagggttattgttacctaggggtagggcagagatgggggtcacggtgagcatgggggacagtagaaggaacaaggagtacatgttaaatctcttctaactttggaaagattttttaaatgttatattactcctggtaagtgttttgttgaatgatcataagacgttgtaggtagaaatgtaaattggcagagtttagtctaggcagctccaaatcttttggtggtgttttatttcctatcctagatggcagaaaacaggtatgcatcacattgttttgtaatctttttaagaaaacagaagttaaaatgaacacatcatcagcaacttgatttttttaccctacaatgtgaggtctatttctgtgcactgaattgtgtccacccaaaaattcatttgttgaaaccctagccctcagtgtgataatatttggagatggggcctttgggaaataatgagagttggataaaatgagggtagggccctcatgatgttattagtgtctttataagaaagaaatttttctctctctcaacaaccccttccctacacccctatctctagtgtaaggacacagtgagaaggcaagccagaaaaggaacgctcaccagaaaccaaacaggcgggaacctagatcttggaccgcttaacttccagaactgtgagaaatacttttctactgtttgagccactgaatctaaggtattttgttaaggcagcccaagtaaattaattctaacactaagccatgttactatacacaaatgtttctctccttttttctaatgccacagggtatctaataatataactagaaaacagtttatttagccattgatggatatttaggtagcttacatttttatattctacaagcaacaatgctatagccttcatgtgctgtacaagccttctcatgaaggcattttgtctcaggatagaaatgctggagcatacagtgtcccttttcaatttgtacttaataaataataccaaaatgtctctcaactggctgtttatgttcccatcaacagcagaagaatctatttttctgcaccctgaataatactgcacattgttggtttttgttaattttgctacttgaaaatagtgaaaatatcatcttttttttttttactaacaattccttgattaatattattgggcaccttttaatgtatttatatctcattaatattttctttcccataaattgcctatttgtatcctttactgatttttaaaatttgggttgtctttttcttattgatattttatagttcataaatactctggataatcttttgtttgctacatatcctgcaaataatttttctcagttccaaaggacatactgtcttttaattctgatcgtagtatcttcacttgtataataggtatacatcttcacttgtcatatgtttcaatacttagctttattttttatcttaatatattttttgctgcctcatagtcataagaatactctcccatattttttcctaatatttttatactacacttttttacttttgggtttgggctttttcttagtgatgtgacatcggaatttaatgttcttgcactaggtagtcaattgccccaacacaatttatttaatacatcattctttttccccacagtgatttgagatgacactgttatcatagaccaaattccctcatgcactgagtcagcttctagacttgcagttcttactgatctttttatccatatctacatcaacctgtgttaattactatagtattatataacagtatcatgctatccattaagtacatccaactctttcatctgttttacaactgtcttgactattcttgtacacttgttcctccatataaatttgagaatctgcttggtaaatgccatgaggagtggggtcaatgggattatggtagattcgtaggtgaacttcaaaatactttttacatggtttatgctatttttcttgccaaccaaacaactacatctttttctccctactgggtacatatcttctaaattgtttagttcatgttaattaggttttacacacaataggaaatattgggtgaaagaacacagtcatgtttaaatgcacattacagagaatataaatccagagacaatctctttgcacttattactcccttaaaaaggtatggctagaaggactccgcatgcacctactgaacaaacacttagtaaattatggattggtaatctcataccagttaaacaaaatagcatgggtttaatataaatcattagagaagcaagtgtaagatttttttttttttttgagacggagtctcgctctgttggccaggctagagtgaagtggcgcgatctcagctcactgcaagctccgcctcctgggttcacaccattctcctgcctcaacctctagctgggactacaggtgcccgccaccatacccggctaattttttgtacttttagtagagacggggtttcaccgtggtctcgatctcctgatctcgtgatctgcccgcctcagcctcccaaagtgctggggttacaagggtgagccaccgcgcccggcttttctcactttcagagttatcaggaaacttactgaaatccatccaacacatattagaaaggatctcaataaatcagatttgctttcccttaccactgctttatcaaaaacacataatattaaaaattgatatttgagatttttttcataattgactctctagtgccataattaaactgggacatatataattaaaatctgaaatctatctgggtaaaggatttaagatttttctaaactatattaatttattttctgtgacttcaaaacacagtagaatcaaagtgattcctacagcactgtcaccacaactttgaacacagaacattaatgtaacctccacaaccaggcatgctgagcatagactaagtgtgacaaggtattaaagcataaagttttaatattgttaggcatgctaacagtacggtggctatgttgtgcaaacacagaattacttacaaaactatttaagggtaaactacaatgtcagggatttgctttaaaatactataggggccaggcacagcggctcatgcctgttaatcccagctctctgggaggccaaggcaggaggattgcttgagtccaggagtttgagatgagcctgggcagcataacaagaccccatctctacaaaaaataaaaataatgtccaggaacggtggcacatgcatgtagtcccagctactcaggaggctgaggcaggaggatctcttgagcccaggaggtcaaggctgcagtgagccatgactgtgccactgcactccagcctgggtgacagagtgagaccctgtctcaaaaataaaataaaacaaaataaaaataaacaaaaacaaaaaaccctataggaaaaaaactgagatgcatgaaacagatgaagtacaaaacactggtaattggagctgtatcacaggtttataagggctatttactatgttccatgtacttttattctaagaacttctcaaaattaaaaattactttagactctggactacaatgtgtaagttttttttaagtttcataataaaatgagcccagttgaacactgatcccctttctgctttaatccataatattcttttctatccaaaactttattagctgtacaaaatgttccaagatcacggaacaaagtttgtcttcttcgcaaaggcatgctacctggtatgtaaccaacagcatcagccttctgtggataaaaatgcactaaagacagggaaagtcaggaagaacaaagtggttaccagggaggaattctgccagccgagagcttgcccttctgcccttcacataagagtctgttggcaaccgagactgggttcttgattcctataaaaaaaaaaaaaaaattggcaaaaaagatgtcagaaatgtcttctagtttcccactcagttttgcagttgtttcaataaaacaacttgaatatatcttggaaattctttttcgatatatcaaataatactaatgaaaacccttaataaccatgagcaataagagttaaatcaaaaaatgtatgaaaacctagaagaaaagaacgaatataaaatacatattctcatgttttgtcacgtgctatagaagcaaaggctgaattgaaatactacatatttaaattaggttcctttttaatagatttcagaatagagtttttaaaatgaactgaaaatatggtactatcttactatcaaaactatatacatgctccaggcatttagtgaccacaaaaccataaattccttttaaagagtaaacatgattataaacagcttcaaattgaccttggagagaaaaattaatgggggaaaaataagccaaaaattttaaatgtcacctacaagagagacagaacggggaaatgtccttcaaattgggtaagggtgggagaagaggccaactgtgtaaaagattgtaacctaaaatgtggttcagattctttccaagaggctaaccagtatgtacaagtgaggtgatagtgcttatccaggagaactgacaggacagttttgagtgtgataaacactgtcaggatgacaatgacaaagacaatgacactgatgacgacaatgatgatgatggtggaaggcaatcaaagtaactatttcctaatgtgctccaggcccagtgccaaattcttaaatctatcggatgagttagctgatccttcaattctgtcatgtaaccacacttattaatcctatctgattaatgagaaaacatttatacagagggttaagttgcctgcccatgatcacagcgctgagttttaacatggaggcagccaatatcggagaccatacccttcatcactaatatacgcctgcctttcaggaaatgattaatacaaacaaatcatcagtggaatatataaagagactacaaaaatttaaattaaggccaacagactccaagaaaaaccaattgtagaaatgtagctcaataccaaatcttccacaaaaaaagtatgaaatacaaaaaaaaaaaaaaagaaaagcccaaatcagatccctttactagttcttaaaacaatatagttctagatgtgatgattcaatattgtaaagacattcatcttttccaagttaacttataaatccaaatctttactccaacttataaatccaatttataactttatattgtttacaaattaacaatttatgttataaatgtataacttataacttataaatttataacttataacttataaattggatttataagttataagttacaacttatacatttataacacaacttataaatccaatttataacttataaatccaattctccatcaaaacttcaaaatgatttccaggatacataagaagctgactcttaatcagaaaaataaaactttgaaaaagaaaaatgaagagttatttaccctgcaagatatcatttttttatttgaagctattctaattaaaaaacagtggtttgagtacaaaataaagaaatgtcaatgaaatagaataaagctaaagttcagaaacaaacacttttgaatttaggtatttaatatttcaaatcagtaggaaaaggataaactacatataagagggagaaagaacacaaaggtaaaagcctaggagtcagactactttgtaactgttccagttaaccggtttattgcttctcagctacaaattcaccctttattgcctgatgtgtgaaaatggatatgggccctctaagtacgtttcctttgccagctagcacaataggtaagctttgtcagtagaggacactaaagaaacactgtaggaggaaagtgttgtcttgcgcaccaggcttcacttctgaccaatgtggtactctcctgtactaagtgcccacagggagcagctttctccagcatttgaacaccacgttttctccagctcctgatttgtgccacagcagcatagctgagagctccagaaagaatgagaccatactccaattcaggtcattgatacccacacccactcctcagccccataggcacacatagcaagtgttccacggggtgcctgcgtagtgagccaaagcccaatctttatcctgcccaagggaggtttaattctcacagcatcttgacctctgtgtgcccacctaccagcctgagcttgcctctgcctcacaggattgatcctactcacacaatgactgtagaccagctctggcctgggtaacccagcaacttctctgccatacagtgaatgatagccacaccttcttcaatgacgtctaaacgtacttccaaacgtgttcttctttgggtattctctctctgccctaggatacatttttgagttctcgtcccatgtttatagagttactcttcaatcactgcttaataactctttatattaaacttctatttaaactatggtatggtttctgtcttctagttttacccagactaatacaatgtccttggacaaactactaaatctctcttgtgtctcagtttcctcatctgtaaagcatagacctcatgagcgtattgtgagaattaaatgatttaaaagcatagacctcaaaatggtattacataggataaaagcataggcctcataacggtattacataggataaaagcataggcctcataagggtatcgtgagaactaaatgatttaaaatatgtaaaccactgggctggatgcggtggctcacgcctgtaatctcagcactttaggaggctggtgggtggatcacctgaggttaggagttcaagaccagcttggccagcatggtgaaacccgtctctactaaaaatataaaaattagccaggcgtggtggcacacacctgttatcccagttactcaggaggctgaggcaggagaatcacttgaacccaagaggcagaggttgcagtgagccaagatcgcaccactgcactccaacctcggccaacacccagagctagactccatctcaaaaataaataaataaataaatatgtaaaccactgtagaacaatgcctacggtattactgtcatttaacaaactgtacttattgttattcaattaactatgtaggaacaatttgaagtcatttcagaaaaaaatgcattcaagaggtaaatgaaaaataaactatacatatgttagaagaaaatacaagtaaattgtgcttataaattatgagagactttaagaaatacaaaatacaaaagccacaaaagagaaagtagtaagtttgacaaacaaaaatgtttaattccaatatgattaaggacatttataaacagggttaaaacgcaagccacacaagaggtatgaacaggtagtacacagagaaatgctaatggccttcaaacacacgaaattttattaaataccaataaaactgcataataagagaaactaaaattaaaactaattaaaaagaaaggatataaaagatcagaacaaataaataaccaaattgacctaagtgacacacacagagcactgtactcaacaactccagaatacatattcttttgaagttcacgtggaaatttaccaaaacacaccataatctgggccatacagcaagtctctaaaagcttcaagggattggtatcatacatagtatattctctggccacagtggaattaaactagaaatcaacaaagaaagctaactaaaatgtcttcaggcaaataaatttgacaactcatatgaaatagacaaattcctagaaaaacgcacatgaaaaataaaatataatcatataaatgttaaaaatattgaatcctactttttaaaacttcccacaaagaaaaccccgttaatttgaaataatttatgaattccttcaaacaattaaaaagtaattattccaatcatatacaaaccttttcaaagaatgggggaaaaaaaagtacccaactcatttttgaaagcagccataacagggtacagaaacaaattatcacacagtcacctaatttcccaacacaattctgtgaggaaaagacttcctttcaatagagggcaatggaccatttggatatccatatgaggaaaaaataaataaatgttgacccctatgttacatatacaaaaattaatctgagcttgataagaaagctaaacatgatggataaaaacaataaaattacagaaagaatgaagattatcttcataactttgaacaggcaaaaacttaaaatacaaagagttaatcacaaaagaaaaggttgctaacttaaacttcattaaaatcagaaacttctattcatcaaaaaacaccattaagagattgtaaaggcaaaccatagactgggagaagatatccataatacatgtatcttacaaaggatttgtatgtaaaatatttaaaatactccaacaaatcaataaaagatataatcaaataaaaatctgcaaaagatgcaaatatgcacttctcaacaaggctatctaaatggtcaaaaagcatatgaaaaggctcttataagtcactagggacactcaaattgaataccactacacacataaatcactagggacactcaataataccactacacacatatcaaaatggctgaattttaaaaacaattaacaataccaaaaattggcaaggatgcagagtaactgaaaagctcctacactgctagtaggagtataaactgcaacaattacttttgaaaaccggcagtatctattaaaacaaaatatatatgcatatgtacctaaagaagtacatacgtggccaggcacagtggctcacgcctataatctcagcactttgggaggctgaagctggcagatcacttgaggtcaggagttcaagaccagcctggccaacatggtgaaaccctgtttctactaaaaatgcaaaaattagccaggcactgtggtgggtgcctgtaatcccagctacttgggaggctgaggcagaagaatcaattgaacccaggaggcagaggttgcagtgagccgagatcgcaccactgcactccaggctgggtaacagaatgagactccgcaccactgcactccaggctgggtaacagaatgagactccatctcaaaaaaaaaaaaaaaaaaaaaacagaagtacatatgtctaccaaaagacatgtaaaataatattcactgaagctttactcaaaaaagtaaaaagctagaaatttcatatgcccattaagaggagagtaaatacagaagttatggtatatccattcaatgaaatactactaagtggtaaaaaataaaatactactgacacaaaacatggatccatctcacaggcataacattaagcaaaagaaaacagacacagaagtgtctgatcccactcatgtaaattttaggaacaggcaaattaatctatggcacccaaagttagcatgagggaagagagcacaagaagtatggaccaaggagaagcataaggggtccttccaggattatgaaaatgttctaccttttgacatggaaatgtttaatgtcttgatctaggtggtggcttatatggtgtctacatctaaaaattcatgaagctgtacacataaaatacatacttcatgtatattttgctttaataaatgaattataaaacatgagacatatcttttatgtactgatgtggaaaaaatctccaaaagattatatttaaatctaaaaagtttataataattaacacatttattttttaagaaaacaaatacaggcacaaaataaaactgtgtttctgttacataaaaatatagataaaagcactggatttttactggttaaaccccacggggaaaggaaatgagaaagaaaagatcttttggaggatcaaaggtaaattttatttatattacctgaaattttttacaacaaaaaatatagtgtgtatttcaaattgtaaaattaatattctaaatcatgtcttaaatgtctttaatctcttcaagggatacaggagaatgatcaaattcaaaccaaaaactacttataactaagactgtatgttttaaattcaataaaaaaagaacatttgttttaaacactattccaagcagaaatggtgaaaaagactgtaatcatctttagaaggcatgaaatggtcacgtgcatgattttccaaagatagtaggtcataatgcccacataccactcagtgctccaactgctccaaaatttaaggattttccatccattatgctggcatcacactcaatttcacctaacagatttagattagatcccattcctgcatttgtaaaaggagaatcctaaaagacaaaaacaaaaattaaaatatcattagtcttaaaaaaagtattaatgtcagtccttcatgaaattttctaaaagctagaaggtgagagaatactttccaacacatagtatgatgccaataccaccctgatgttaaaacatgacaaagatatcagcagcaaagtacagatcaatatactttgtaaatattgaccaaaaaaacatcaaagaaatagcagcaaaacaaatccagcaaaatataaaaaggactgtatatcacaaacaagaggaaagtaagattggtttaatatctgaaaatcaatgtaataccctgtattaataaaatacagggaaaaaaacatgattgtatcaaaaaaaaaacacagaaaaaaggcatctgacaaaatccaacaccctttcatgagaaaaacagaaaactagataagggaacttcttaacttgacaaaggggatcaatgaaaaggccaggccaggcgcagtggctcacacctgtaatcccaacacttagggaggccaaggtggaaggatcacttgagcctagctgttcaagaccactctgggcaacacagtgagacaccatctatacaaaaaaatttaaaacttagccaggtgtggtggtatgcatctgtggtgccagctgctcgggaggctgaggttggagatcactgaagcctaggagattgaggctccagcaaaccataattacgccaaaaaaaaagtccagagttaacattataattaatggtgaaagactggatgccttcccctaagatcaggaacaagacaaggatatccactctcagtacctattcaccaatatactgtacaatctaaccagacaattagacaaaaaggagaaagaaagaaaggaagaaaggaaggaaggaaggaaggaaggaaggaaggaaggaaggaaggaaggaaggaaggaagagaaagaaaaggaaggaaggaaggaaggaaggaaggaaggtaggtaggtaggtctagattggaaaagaagaagtaaaattgtctgtttcaagataacatgacgctgtatgtagaaaatcctaaagaatccactaaaaaaaaattagaattaataagtttaggaaggttgcaggatatgagattaatgtgcaaaaatcaattggatttttatatattagcgataaacaatctaaaaatgaaatcaagaaaatctcacaataacatcaaaaacaaaaaaacagaaatacatttttaaaagaagtataagacttgtatgctaaaaactgtaaaacacattgaaaaaatttttaattcaatacctaaataggtggaaaacattctatgtacgtggaccagaaggcttaatgttgttacaatggcaatactccccaaatcaatctaattcaaaataatcctttatcaaatcctagctactttttttggcagaaactgacaggctgatcctaaaattcatatggaaatgcaagagacgcagaataaccaaaacaatcttgaaaagaacagaactgaaggactcatacttactacaaaactacagtaatcaagacagtgtaatatagacatatagctaaggatagatatataaattgatataatagaaatgagaatccagaaataatacacccttataatcaattcaacaaggttgccacaacaattcaataaagaaggtatagtctttcgtgggttttttttttttttttttgagatggagtcttgctctgttgcgcaggctggagtgcagtggtgtgatctcggctcactgcgagctctgcctcctgggttcacgccattctcctgcctcagcctcttgagtaggtgggactacagccacccactaccatgcccagctaattttttgtatttttagtagagacagggttttcaccgtgttagccaggatggtctcgatctcctgacctcgtgatccacccgcctcagcctcccaaagtgctgggattacaggcatgagccaccgcgcctggccagaaggtatagtcttttcaataaatggtactgggacaattagatagccacatgtaagaaaatgaagttggacccctatctcacaccatgtataaaaattaactcaaagtggaccaaagccctgtatgtaagagctaaaactacctaactcttcaaagaaaacataacaacaaatgttcataaccttggataacaaaatagtttcagatttgacaccaaaaatacaaccaaagaaaaaactaggtaaataggacttcatcaaaatttaaaacttttatttcaaaggacaccataaagaaaatagggggaaaaaaacacaaaatggaagaaaaaatttcaagccatgtatctaataagggatttatatccagaatatatatttaaaaaaattctacagctctaaaacaaaaagatgacacaatttaaaaatgggaaaagaatatgaattaacatttctccaaataagatatataaatcaacagcaagcacatgaaaagatgttcatgccattgtactctagcctgggcaacaaagtgagaccctgtctctaaaaaataaatagataaaaatcaattctaaaaacagaaaaatgtggccagccatggtggctcacacctgtaatcccagcactttgggaggccgaggcaggcagatcacttgaggccaggacttcaaaacaagcctggccaacatggtgagaacctgtctctactaacaatacaaaaatcagctggacatggtggtggtcatctgtaatcgcagctactcaggaggctgaggcacgagaatcgcttgaacccaggaggcagaggttgtagtgagccaagatcttgcaccactgcactccagcctgggtgacagggcgagactctgtctcaaaaaaagaaaaagaaaaatgttcaacatcttttgtcatcaggaaaaggcaaatcaaaacccacaacaaaatactacttcaaacccacaaggatggctataatcatacagataacaacacatgttgggaaggatgtacggacatgcaagtaagcagaataatatggcccacaaccagaataaataccaaataataacaaacgcagaaatgacaacaatgaccgaattagcaaacaattttaatgttagctaacaatgttaaactcgatcatataaacatactctatatgttcaggtaggtatatgaaagcattagcaaaagaaggaaagaaaacacaactgtaaaaatttttgaccaggcacagcagctcacacctgtaatcccagcactttgggaggccaaggcgggaggattacaaggtcaggcattcgagaccagcctggccaacatggtgaaaccccatctctactaaaaatacaaaaattagctgggcatggtggtgctcacctgtaatcccagctactcaggaagctgaggcaggagaatcacttgaacccgggaggtggaggctgcagtgagctgagatcatgccactgcactccatcctgggtgacagagcaacacactgtctcaaaaaaaaataaataaataaaaataaaaatttttagagatgaagtagacaataatttaaggtaaaggcactttgaaaatggttaacagtaaatttggcactgcagaagaaaatagcaataaacgtaataatacagcaataaaaattatccaaataaatgacaaagtgaaaaaaatactaagaaaaggaaaaagaagaaaaagaaaaggaggaggaaaagaaagaaaaaaacagtactggagaagaatgggaaatatcaaatgatccaacatgcacgtaactggagtcccaaataaaagtagacaaatggatgaacaataaaaatattagccaaaaattatccaaacttaataaacactatgaacatacaaatccaagaagctcaacaatccccaaataaaagaaatatgaataaaaatacaacagagtacatcataatcaaaatgctgaaaaccagcaataaaatcttaagagcaacaagagcaaaaagacacatgtgaaaatgaacaaaaatattaaagcagatttctggtcagaaacaatgcaagacagaagacaatggagtaatctctttaaagaactaagagaggaaacaaactaaaaactgagaaaactacaaaatgtcttcattaagtaaaggcaaaataaagacttcttcagacacataaaaattgggataatttttcaccagcaaacctacactataagtaatgttaaaggatattctacaggccaaacaaaaaagacaccacatgtaaatctgggatatgcaaaagaatgcaagtgattaatactctaaataagtgggaagatataaagaacttttatctcattttcaaagtgtttcaaatgataattgtttaaagcaaaaatactaacaatgtatcatggggtttataacatatacaggtgcaaactatagggcacaagtagcacaaagattgtgaggaatgaatggaagtgtaatgttacaagcttctgacattatacatgaaggcctataatattaatataatttgaaagtagactatgataatccaaaagtgtattttgcaaatggtagggcaactactaaaaaaataaaagaagtatagctaataggacaaaagtggagaaaaaaatggttcattttttttaaatcctcaaaagatagcataagaagaagaaataagaacaaagtagagatgaaaggaatagaaaataacgagatgattgctttatatgcagccatatcaacaattacattaaatttagctgggcacagtggcgcacacctgtaatcccagcactttgggaggccaaggcaggcgtatcacgaggtcaggagttcaagaccagcctggccaacatggtgaaatcctgtctctattaaaaataaaaaaattagctgggcatggtggcgggcacctgtaatcccagctactcgggaggctgaggcaggagaatcacttgaaaccagaaggcagaggttacagtgagccaagatagcaccactgtactccagcttggtcaatgaaagcgaaacactgtctcaaaaaaaaaaaaaaattatattcaaattgtctaagcacttgaattagaggctcactgactgtcagaaaactttacaagaaactgtacttaattataagagcatagacagctaaaagtaaaagcatattaggagatattaccaaaaatatatcaaaacatcccttctctcattgctcatattagtgatgtctgactcttcttttacattcctaatcagtctggcttgatgttgataaattttattaatcttttaaagaactaacttaactattggtttggttgactttctgttttctatttcattgatttctactttttttcttttgtataattttttttctttttgtatactttggatatgacatgcttctctttttctagtttcttaaaatgataggttaagtaactgatttgagatcttccttcttttctaataagcaatgaatgctacaaatttcttcagaatgaggaacatcatccctcttgaatatacatgcaaaaatccttaacaaaatattaacaaatctaatccagcaatatataaaaagaacaatacattatagccaagtgaaatacatcccagtaatacaagactagtccaacattagaaaatcaattaacagaccaggaaaaatcacaagatcatatcaatacttgctgcaaaaacatcctaaaaataattcagtatccattcatgatgttaaaaactctcagaaatccaggaatagaggagaatttccttaacttaattaacttaaaaatgataatacatcataaccaagtagcgtttattccagaaatgcagggctgattaaacagttaaaaaaaaatcaccttccattccatgatggccaaataggaacagctccggtctgcagctcccaacatgaccaatgcagaagacaagtgatttctgcatttccaattgaggtacctggttcatctcactgggactggttggacagtgggtggaggccacggagggtgagccgaagctgggtggggcatcgcctcacccaggaagcacaaggggtcggaggatttccctttgacagtctgccatgacagactgtacctggaaaaacaggacactcctgaccaaatactgtgcttttcccatggtcttagcagccggcagaccaggagattctctcccatgcctggctcggcaggtcccacacccatggagccttgctcactactagcgcagcagtctgagatcaacctgcgaggctgcagcctggtgcgggaaggggcgtccaccattgctgaggcttgaataggtaaacgaagtggctgggaagctcgaactgggtggagcccaccgcagctcagcaaggcctactgcctctacaaactccacctctgtggggagggcatagctgaacaaaaggcagcagaaacttctgcagacttaaacgtccctgtctgatagctctaaagagagcagtggttctcccagcatttcatttcagctctgagaacgaacagactgcctcctcaagtgggtctctgagccccgtgtagcctaactggaagacacctcccagtaggggctgacagacacctcatacaggtgggtgcccctctgagatgtagcttccagagaaaggatcaggtagcaatatttgccattctgcaatatttgctgttctgcagcctctgctggtgatacccaggcaaacagggtctggagtggacctctagcaaattccaacagacctgcagctgagggacatgactgttagaaggaaaactaacaaacagaaagaaatagcatcaacatcaacaaaaaggacatccacaccaaaaaccccatctgtaggtcaccaacatcaaagacaaaaggtagataaaaccacaaagatgaggagaaaccagagcagaaaaactgaatattctaaaaaccagagcgcctcttctccaaaggatcacagctcttcgccagcaatggaacaaagctggatggagaatgactttgaggagatgacagaagtaggcttcagaaggtcggtaataacaaacttctccgagctaaaggagcatgttctaacacatcgcaaaaagctaaaaaccttgaaaaaaggttagacaaatggctaactagaataaacagtgtagaaaagaccttaaatgacctgatggagctgaaaaccatggcatgagaactttgtgacacacgcacaatcttcaatagctgattcaatcaagtggaaaaaaggatatcagtgattgaagattaaattaatgaaataaagtgagaagacaagaatagagaaaaaagagtaaaaagaaacaaacaaagccttcaagaaatatgggactatgtgaaaagaccaaatctacgtctgattggtatacctcaaagtgacaggcagaatggaaccaacttggaaaacactcttcaggatatcatccaggagaacttccccaacctagcaaggcaggccaacattcaaatccaggaaatacagagaacaccacaaagatactcctcgagaagagcaactccaagacacataattgtcagattcaccaaggttgaaatgaaggaaaaaatgttaagggcagccagaaagaaatgtcaggttacccacaaagggaagcccatcagactaacagctgatttcttggtggaaaccctacaagccagaagagagtgggggccaatattcaacattcttaaagaaaagaattttcaactcagaatttcatatccagccaaactaagcttcctaagtgaaggagaaataaaatcctttacagacaagcaaatgctgagagattttgtcaccaccaggcctgccttacaagaactcctgaaggaagcactaaacatggaaaggaacaaccagtaccaggcactgcaaaaacatgccaaattgtaaagaccatcaatgctatgaagaaactgtatcaattaacggcaaaataaccagctaacatcataatgacaggatcaaattcacacatcacaatattaaccttaaatgtaaatgggctaaatgccccaactaaaagacacagactggcaaattgtataaagagtcaagacccatcagtgtgctgtattcaggaaacccatctcacgtgcagagacacacataggctcaaaataaaggggtggaggaagatctaacaagcaaatggaaagcaaaaaaaagcaggggttgcaatcctagtctctgataaaacagactgtaaaccaacaaagatcaaaacagacaaagaaggccattacataatggtaaagggatcaattcaacaaaaagagctaactatcctaaatatatatgcaccaaatacaagagcacccagattcataaaggaagttctgagagacctaaaaagagatttagactcccacacaataataatgggagactttaacatcccactgtcaatattagacagatcaacaagacagaaggttaacaaggatatccagggcttgaactcagctctgcaccaagcagacctaatagacacctacagaagtctccaccccaaatcaacagaatatacattcttcccagcaccacactgcacttattctaaaattgaccacataattggaaataaagcactcctcagcaaatgtaaaagaacagaaatcacaacaaactgtctctcagaccacagtgcaatcaaattagaactcaggattaagaaactcactcaaaactgcacaactgccaggtgcagtcgctcacgcctgtaatcccagcactttgggaggccgaggagggcagatcacctgaggtcgggagttcgagaccagcctgaccaacatggagaaaccccatctctactaaaaatacaaaaaaactagccaggcatggtggcgcatgcctgtaatcccacatactcggggggctgaggcaggagaatcgcttgaacccaggaggcggaggttgcagtgagccaagatcacaccattgcactccagcctgggcaacaagagtgaaactcgtaaaaaaaaaaaaaaaatgcacaattacatggaaattgaacaacctgctcctgaatgactactgggtaaataacaaaatgaaggcagaaataaagatgttctttgaaaccaatgagaacaaagacacaacataccagaatctctgggacacatttaaagcagtgtgtagacggaaatttatagcactaaatgcccacaagagaaaacaggaaaaatccaaaatcaacaccgtaatatcacaattaaaagaactagagaagcaagagcaaacaaattcaaaagctagcagaaggcaaagaaataactaagtttagagcagaactgaaggagacagagacacaaaaaacccttcacaaaatcaatgaatccaggagctggttttttgaaaagatcaacaaaatagatagactgctagcaacactaataaagaagaaaagagagaagaatcaaatagatgcaataaaaaatgataaagaagatatgaccaccaatcccacagaaatacaaactaccatcagagaatactataaacaactctatgcaaacacattggaaaatctagaagaaatggataaattcctggacacacataccctcccaagactaaacctggaagaagttgaatctctaaatagaccaataacaggctctgaaattgaggcaataattaatagcctaccaaccaaaaaaagtccaggacagacggattcacagccgagttctaccagaggtacaaaggggagctggtatcattccttctgaaactattccaatcaatagaaaaagagagaatcctccctaactcattttatgaggccagcatcatccttataccaaagcctggcggagacacaacagaagaagaggattttagaccaatatccttgttgaacatcgatgcaaaaatcctcaacaaaatactggcaaaccgaatccagcagcacatcaaaaagcttatccatcacaatcaagttggcttcatccctgggatgcaaagctggttcaacatacacaaatcaataaacataatccatcacataaatagaaccaacaacaaaaaccacatgattatctcaatagatgcagaaaaggccttcgacaaaattcaacagccttcatgctaaaaactctcaataaactaggtactgatggaatgtatctcaaaataataagagttatctatgacaaacccacagccaatatcatactggatgggcaatagctggaagcattccctttgaaaactggcacaagacaagcatgccctctctcagcactcctattcaacatagtgttggaagttctggccagagcaatcaggcaggagaaagaaataaagggtattcaattaggaaaagaagaagtcaaattgtccctgtttgcagatgacatgattgtatatttagaaaaccccatcatctcagcccaaaatctccttacgctgataagcaacttcagcaaagtctcaggatacaaaatcaatgtgcaaaaatcacaagcattcctatacaccaataacagacaaacagagagccaaatcatgagtgaactcccattcacggttgctacaaagagaataaaatacctaggaatccaacttacaagggatgtgaaggacctcttcaaggagaactacaaaccactgctcaacaaaataaaagaggacacaaacaaatggaagaacagtccatgctcatgggtaggaagaatcaatgtcatgaaaatggccatagtgcccaaggtaatttatagattcaatgccatccccatcaagctaccaatgactttctttacagaattggaaaaactactttaaagttcatatggaaccaaaaaaagagcctgcattgccaagacaatcctaagcaaaaagaacaaagctggaggcatcatgctacctgacttcaaactatactacaaggctacagtaaccaaaacagcatagtactggtaccaaaacagatatatagaccaatggaacagaacagaggcctcagaaataacactacacatctacaaccatctgatctttgacaaaactgacaaaaacaagaaatggggaaatgattccctatttaataaatggtgctgggaaaactggctagccttatgtagaaagctgaaactggatcccttccttacaccttatataaaaattaattcaagatggattaaagacttaaatgttagacctaaaaccataaaaaccctagaagaaaacctaggcaataccattcaggacacaggcaggggcaaagacttcataactaaaacaccaaaagcaatggcaacaaaagccaaaatagacaaatgggatctaattaaactaaagagcttctgcacagcaaaaagaaactaccatcagagtgaacaggcaacctacagaatgggagaaaatttttgcaatctactcatctgacaaagggctaatatccagaatctgcaaagaacttaaataaatttacaagaaaaaaaccccatcaaaaagtaggcaaaggatatgaacagacacttctcaatagaagacatttatgcagccaacagacacatgaaaaaatgctcatcatcactgctcatcagagaaatgaaaatcaaaaccacaatgagataccatctcacaccaattagaacggcgatcattaaaaattcaggaaacaacagatgctggagaggatgtggagaaataagaacgcttttacactgttggtgggagtgtaaattagttcaaccattgtggaagacaatgtggcaattcctcaaggatctagaactagaaagaccatttgacccagcgatcccattactgggtatatgcccaaaagattataaataatgctactataaagacacatgcacacatacgtttatttcagcactattcacaatagcaaagacttggaaccaacctaaacatccatcaatgatagactggattaagaaatgtggcacatatacaccatggaattctatgcagccataaaaaaggatgagttcatgtcctttgcagggacatggaagaagctggaaaccatcattctcagcaaactatcacgaggacagaaaaccaaacaccgcatgttctcactcatagatgggaactgaataatgaaaacacttggacacagggcggagaacatcacacaccagggcctgtcaggcggtggggggctgggggagggatagcattaggagaaatacctaatgtaaatgacgagttgatgggtgcagcaaaccaacatggcacatgtgtagctatgtaacaaacctgcacgtcgtgtacatctaccctagaacttaaagtataattttaaaaaaaaatcaatgtaattcaccatattaagagaaaaaggaaaaaaccatatgatcatctcagtagatacagataaagaggctaactaaatccaacatccattcgtgatttaaaaaaaaaaaaaagatcctggaaaacaaggaatagaagggaactttctcaaccttctcaaccacataaaaacttatttatgaaaaacaaatagttattcctatatttgtctatattttaaaaacaagccaagtgaaccactgagttagtaagctcataggatacaagatcaatatataaacaaaaactttttctatatagtagtaataaactattggaaattaaatgtttttaatatcaattatcatagcatcaaaacatgaaatacttgggaataaacataatacatacaagatctgtacactggaaaccacaaaataatcttgagagatattttttaaatccaataaatggaaagaaatactatgttcatgaactggaaaattcagtattattaaattgatcaacaggttcaacacaatcccaatataaattccggcagtctttctcttcttgtaaagattgacaagttggttttaaaatacttatgtaaatgcaaaggaactagaatagcaaagaaatcttgaaaagaaatttagggactcacattgcctgatttcaagatttcaagagtgtggtattgacataaatttagatatatagatgaaagagatggaatagagttcagaaatagacacacagagaaatggtcaatttttgccaaaggtggcaaggcaattcaatggagaaagaataacattttcaagaaactgtactagaaaaatatacaaaggaaataaaagatatttacctcacactagaattcaggaaaaattgtttttgaaaaggaccatacacctacatgtaggggttaaaactataaacactgtaaaagaaaaaacaggataaagtattgtgaccttacattaggcaagtatttcttacacagaaaaacatatattatacaagaaaaaataattgaattttatcactttactgttcaaaagcaattaaaaaaagcaagccattatacatatacatatgtgtatgtatatgcacacatacatacatacataggttagtacaaaaacatgtatatccttgctctgtcagctgagaggccctataaacaatgatactccaacgagcacatctaggaaccaagctttggattcaaatactattctccaataaggtaaccagtattccttggagaaatggctgattctaggactgaggcaagaaatgtacaaggtaagcctggccgggtgtggtggctcacgcctgtaatcccaaccctctgggaggcccagacaggagaatcacttgagctcaggagttcgagaccagcctgggcaacacagcgaaactccatctctaaaaaataaaatacaaaaattagccaggtgtgatggcaggcacctgtagtcccagctattgagcggctgaagtgggaggatggcttgagcctgggaggctgaggttgcagtgagctgtgatcatgccactgcactccaccagcctgggcaacacagtgagacagcaactgtctcaaaaaaaaaaaatgagcctggagcatcttatactaccagaaaggaagtgttcaaaaataaaaaaaagaaatcataatgatggggatatatcaaagggccacaagggccaactgaaagagctcccaatggccaaagcagaaacaatttgagcaacaaaataaataaagcagtattagactacaactaaaaggataaaatgtaaatatccatgagtccatactgatataaattcattactgaatgaataaatacataaataaataggaggaaaaagaaaatttttgcaaaagaattccaaaaatattagttactccatgctcaagaaggtgaagcaaaactccccactccttaagtgtgaggtacctatactgacttccttctgaagaatacagtatatgtgtagagggaaaaaagaatacctttagagtggaaaaacccagcaaacactacactgtgtaaggcatgtgatacaagtcaacatcaacagcgataagtcatggtcataatatgtacccttgatatcgtatgatgagaatgacaatttatctctaaggtcttccacctaaaaacccataaccccattcttttttttttttttttttttttttttgagacagagtctcgctcagttgcccaggctggagtgcagtggctcgatctccactcactgcaagctccgcctcctgggttcacgccattctcctgcctcagcctcccgagtagctgggactacaggtacccgccaccatgcccagctaatttttttgtatttttttagtagagatggggtttcactgtgttagccaggatggtcgtgatctcctgacctcgtgatctgccctcctcagtctcccaaagtgctgggattacaggcgtgagccaccgcacccggccacccataaccccattctaatcatgacaaaaacatcatacaaatctcaattaaaggaaactccacaaaacactggactagtattcctcaaacaggttatggtcacaaaaaacaaggaaagtctgagaaactgtcacagccaagaggaacctagaaacatgacaactaaaaatgtaatgtggtatcctggatggaaccctggaagagaaaaaaggcattaggcaaaaactaagaaaatctgaacgaagtatggatgtcagttaataatgtatcaataaaggttcattcattatgacaaatgtacctgctaattaagatgctaattagggaaactggatattagcatatgagaattctctaaaccagtggtccccaacctttttggcaccactgggaccagttttgtggaagacaatttttccatggatggggtggggaatggttttagaatgaagctgttccacctcagatcatcaggcattagattcttataaggagcatgcaacctagatccctcacatgtgcagttcacaatagggctcctgctgctataagaatctaatgccaccactgatctgacaggaagcagagctcaggcggtaatgctcacttgcccaccattcccctcctactgtgtggcccagttcctaacaggccacagactgataccagtctgaggccctagggttacggacccctgctctaaaatatcttcacaattgttttgtaaatctttaaactgttctaaaataagtttattaaagaaaaatggggccaggcatggtggctcatgtctgtaatcccaacactttgggaggccgaggcaggtggatcacctgaggtcaggagttcaagaccagcctggtcaacatggtaaaaccccatctctactaaaaatacaaaaagcagctgggcatggtggcgtgcatctgtaatctcagctactctggagactgaggctagagaatcgcttgaacccggagggtggaggctgcagtgagctgagatcacaccactgcactctagcctgggagataaattaagactccatctcaagaaaaaaagaaaaaagaaaaatgggccaggcagggtgactcacacctgtaatcctaacactctgggaagccaaggtgggcagacagcttgaatccggcagttcaagaccagcctgagaaaaatggtgaaactcagtctctacaaaaaaaaaatacaaaaatttgccaagcatggtggtacacgcatgtagtcccagctaccctggaggctgaggtgggaggatcgattgagcctaggaggtggaggctgcagtgagccatgatcatgccaccactctccagcttgggaaacacaacaagatcctgtctcaaaaaaataaaaataaataagtttattaaagaaaaatcaaaccacagtctgggagaaattttataaaacatattatctcttaacggacttctatccagaatttatttttaaaaatccatacataacgcagtaagacaatccaaagtttttaaggggcaaacagttttatatagattgcaaataacacatgaaaacatgcttagcatcattagccataaaatgtctcttattgatcaaactctattcaaatttccctgaactacttttcaactgggctagacttttggacttccatgtttatctctgtactgttcaattttaataagaatcttgctaaatcagtctaacaagatactcccacccttgatatctggtcaccctcaatatttaatcagattcctcattctccaccatcccccaagtgacatctgatcactgtggtctgtctccagcaagaattctgttaggccgatttagctagaatctccccttacctgtgatgtttcctgttagtaattttccatccactgactcctacccagttttttagctataaattgtcacttgtccatgctgtattcagagttgaacccaatctctctccctcactgcaaaatcccatagcagttgacatggtctggatgttttgtctccttcaaatctcgtactgaaatgtgacctccaacgttggaggtgggcctagtaggaggtatctgggtcatgggggcggatacttcatagaatggcttggtgctgttctcacagtaattagtaagttttcactgtatgagtccatgtgagatctggttgtttaaaagagcctgccacctcttccctctctttcttgctccctctctcaccatgtgatataccgactcctcctttgtctcctaccattattttaaacttcctgaggtctcaccagaagctgagctgatgctggtgtcatgcttgtatagcctgcagagccaagagccaaataaacctcttttctttataaattatccagcctcaggtattcctttatagcaatgcgaaagcaactaatacagcagtggttcctacagctatcacaatagttcctcccttgaataaagtctgccttaccacctttcacacgggtcataaataattttttcattaacagtagccattagggaaatgcaaattaaaaccaccagataccattatataaccactaaaatgactaaaatttaaaagattgacaaaactaagtattggcaaaactgcagatctgtggaaatctgaatgaattatatatgttgctagtgagaacacaaatggcaaattgtttagcagttttctttaaagttaaccatacactcaccacagactcagcaattctattcctaagaattttatctgtgagaaatgaaagcatatgttcacataaattcacataaagtctacataaagacataatacatatatatatatatatatatatatatgtatttcttatacacccaacaatatgggtgaatctcaaaagcattacgtgagttaaagaagccagtcacaaaagatcacaagttctataattctatttagaataaaatctagaaaagactgaactatagtgacaaaaagcagataatggttgccaggggccactgagggagaggattcactgtggataggtatgagggaaatttgagagtaatggaaatgttatacatcatgattgtactggtggttacacaattgtatatatttgtcgaaacccatcaaattgtacactttacattgatcaattttgttgcatgtaaattatactccaataaagctgacaaaaaagtagtatacctattacttgacataaactaatcagcctatatactaacttgccccttataaataataaaatcacttttggaggctgagacaggaggatcactcaaggtcggcggtttgagaccagcctgggcaccacagtaggaccccatctctccaaaaatttttttttaaatagctgggcatggtggtgcatgcctgtagtcccagctgctcgggagggagatcagggagactgcttgagctcaggagctctaagctgcagtaagctatgattgcaccactgcgctccagcctgggcaacagagtgagacctttctctaaaaaaaaataataataaatttaaataatttaaaataatatacataaactttttaagcggtcatctgatcttctgatgtaactcattttgcgtaattaataatcatgtccagtaagtagccagtgctccttttaaaatctgtcagactctgtcactcctctgttcataaacctacaatggtttcctagcacacttagaataaaatccaaagtcctaattttcaacatttacaaggccctacatgatctgacccttccctccctcttccaacttactctccgcattcttctctcttaccacactccagcccacactgcgattctgagcacatcaagaaagcccctacctcagggctgttgcatctattattcattcattcctttgagatgctgagtttggtgagagatttctagtgaaagaagagggcccataaatatagactgcatgtgtgtgcgtgcgtgtgtgtgtgtgtgtgtgtagatgcattacatgtatgtataaatacctgaggtcccacagtgattagtattataaagaagaatgaagtggaatatgaagggacagtgggtacttttctctctgaacaagaactcccttccccaacatcttcacatggctttctcccccatttcattcatgtctctgttcaaaagtcagctttatcagagagtgctccccttactgactcatctagaatagcatttccccagccattcccaacattctcttatctctattttatttttctttatggcactttccgctacctgacagtatacataatttttgtttgtctacccctccaaatagaatgtaagacccttaaatataagaatttgtctttttaggctggacgcggtggctcacacctgtaatcccagcactttgggaggctaaagtgggcagatcacgaggtcaggagatcgagaccatcctgactaacacggtgaaaccccgtatctactaaaaatacaaaaaattagctgggcgtggtagtgggcgcctgtagtcccagctactcgggaggctaaggcagtagaatggcgtgaacccaggaggcggagcttgcagtgagccgagatcacgccactgcactccagcctgggcgactgagcgagactccgtctcaaaaaaaaaaaaaaaaaaagaatttgtctctttaggtgctatatcccaatatgtaaggcaatgcctggcacatggcaggtaggtaatcaataagtatttgcagaatgaatgaacagcagttaattataactagatataaacagagtaattattgtgagctataaccccttaagcaagctgatacttattaattcttacaggttgctcctatagagaaatgtcaggaaaatgtagtggagtgctaagaatctaatcttttcaagattaaaacaagagaaattaaacaaacttaggcaacagtattttctgtttctaaaaaatggaattctaaaaccaaaatatattttaaacttattcataacttttcaaggagacatggctttaagaagtgagatgccctttgactaaccaacccagcaaagagagggcagaaaggccaacaggcaagtcaggagctactctcccaccacgacatggaaaccctttcctattaatgaaattttggaaccccaagccaaggcaaagatctgcaaagtattactctttcactataaaccacaacttgtattacccatttaatgtcctttgctgaaggcataaaataatataagaactgtttgcaaggctccagggtatactgcatctctgaggatctattatgagacctctattaacagctcttacagatgcaaacaatttagttttcaaatattgtacaaaaactagactggcacattataaaatcatttttatataaaatgatttatgtttgtccaatttccaatcttcctttaacgagaagtcagacattaacaggaaattactaatatgttagtactcacactctgtcgctcaagtgcaaattcaacaaacacatcattagatacatgaaataaagtagaatatataactcttgttgaaaattgaatgtcctatcaaaatcattttaattgagtttgtgaccagcccggccaacatgatgaaatgccatttccactaaaaatacaaaaattagccaggcgtgatggcaggtgcctgtaatctcagctactcagaaggctgaagcaggagaatcacttgaaccttgaacctgggaggcaaaggctttagtgagccaagactgtaccactgcgtactccagctgggcgacagagcaagactctgtctcaaaaaaaaagaaaaatcattttaattactaacttcattgataagcagatacctttaaccttctaaagctgagaaaggtggggaaaaagctttcgaaatgaactttcttgcatctttttaaaagagttacaaaaacaggatatgtactccatgtcattatactctttttcaaactaacactagtaaaacttgtacaatatgcctatcttagctagcactattctaagaattactaattttctggtatcccaacatcagttttcatttacaggatgaatggaagccaatgaaactgtattactgactgaaaaaatcatttggggaatttttttttgtttagttgccaattaagctcaaattttcaagaattggatggttaaaagatttccaatttagattcctctgtggtagcacaggttaagagtcattaattcaacaaatatttattggacaccattgtaccaggcaaatcttttctgtaaagggcaagatatattaactagttcaggcctcgtgggccacatagacaatgctacaactactgagctctgccactgtagcacaaaagcagcaatagaaaatacacaaatgaataagcatggctgtgttccaataaaacttcatttatggatactgagatatgaatttcatatacttctctggtgtcatgaaatattattcttcttttgattttgtttcaaccatttaaaaaagtgaaaatcattcttagtttgcaggccattcaaaaccaggcatctggccagatttggctttctggccatagttggccaatccttgatctaaaccacggggatatagcagtgaacgaaacagaaaaacattcttacctacatggagcctcaattctagctaagggagacaaacaataagaaattaaatacattagataacatgtcagatagcagtaaacacgagagtgaaaaaataaaacaggtaagcaataggagtactggggatggtcagagggcttttattaaaaagaaaactatagcagtagttacaatttatttatcatttttttggacataatttcagacttatagaaaagtacgatagtctagtatctagactatataaagagctccaaatttcaataacaacccaaaaaatcaatttgaaaatgggcaaaaaacttgaacagactcaaataaacatttctaccaaaaagatacacaaatggctacaggaacattaatatatccaatatcatgatcatcagcgaaatgaaaaccaaaactacaaagattttacttcacatccacaaggacagttatgacgacaaaaacagaaaatagtaagtgctaacaaagatgtagaaaaaattataaccttgcatattgctgctggaaatgcaaaaagggttcattcagttaccatggaaaaaggttcaacaaaaagttaaacacaggccaagcgcggtggctcacacctgtaatcccagcactttgggaggccaaggagggcagatcactcgaggtcaggagttcaaaatcagcctggccaacatggtgaaaccccatctctactaaaaatatttttaaaaattagtcgggcatggcggtgggcgcctataatcccagctactggggaggctgaggcaggagaatagcttgaacctgggaggcggaggttgcagtgagctgagacggcgccattgctccagcctgggcaacaagcgcaaaactctgtctcaaaaaaaaaaaaaaaaaaaaaagttaaacatagaattaattaccatatgacccagcaatttcacttctaggtatatacccaaaagaactgaaaaaagttactcaaatacctatacaagagtattcatagcaacactatgcacaatagccaaaaggtagaaacaacccatatgtccatcaatgaatgaatggatttggaatgaaacaaactgtgatagatacatgaataatgttgaatactgctcctccaaaaaatgaagtactgatacatgctacactgtgaacaaactttaaaaacattattctaagcgaaaaaagccagacagcaaaggccacataaatggcatgattctatcaatataaaatatccagaagaggtaaatccatggacagaaagcagatgggtggtccacaagggggaaaggataaaagaatgaagagcaactgcttgatgagtatgaggtttcctttggggagataaaaatgtttggaactgaaagtggtagttgcacaacactgtgagcattttaatgccatgggattatgcattttaaaatgcttcattttgtattctaagaatttcacttcaatttaaaaaggcagacacaaaagaatacataatatatgattccatttacatgaagttctagaacaggcaagactaatatatggcaatagaggtcaggaccagtgttaccctgaggtgactgaagggggcacaaggggccttctggagggcagaaatgttccgtttgctgatctgggtgctagtgacacaaggccggccatgttcactctgaaaaaaattcatgaagctgtccccttaaaataaatgtgtatagttttccatatgtatactatacacacaagaaagctttgaaactataaaattttcaaaataagattgcaaattttttaaaaactgttaccattgtgaattaaagggtccaaaggatctctcagtattatttcttatgcctgcatgtatccacaattaacttacaaagttttttttttaaagagtcaaagaattaaaattccagactctcatccccaaagattctggtccaggtcatgagttgaaagctagggaatcatcattttttaaaataagctacctccaacaattctaatccagccctcaccttgagaaactccagtgtaaatgaactccgtcagctgcttaacttcatattctccatgaaccacatctggagggggcttgtaaaggcatctattgcaacagcacagaggatattgggagtaaaaaagctacaaatgatccatgagaggctacaaaagctaaccactctggggctaggattcaaccctggaaaaaaaattagatggactggagaaaagttaataaaatgggagacagtcaatggtaaatagacatagaaacctttctgggcaatcatcacaaagacagccataaatattatccacaaaacagcaatttttcttatgttttccattaagatgtaatgcaatcaagataaatgatgttggaagctaaatatcctttaggaagttatcaggacaaagtgtgaaaatcagtgcagtatgcttggactttcagtacgttccttcatcacaaacagtaaaaacaatatttcactcctgggactaaaagtaaataaacaatttggttcaaccttatttgggtcaccgaggtttttgatctgctttagcttcaggtcaaaaattttagagtgatatactttggtattagttcaaattgtttcaatgaggaatttttttgaaaagtctagtttgatttgaagctcattttcaaaataaaagttaatatttaagtccaattcctattctgaaaaattaaatcaaagctcattccggctttactattagtttggtagaaatccctattacaacaattcgcagcctctagaccattaaattaatgaccattaaaccatacattcatttccctggcccttgcaacaagacaaaagctaataatctctgtccaagacttatttccagctataccttaaaatgatatacagtgctacaaaagctcctacactcaaaagaaccagctgtcacttagctctgggagattgtagccctgggagaatgcatgctccatgtggccagatctcatttttgccaagataatttagaagtccagatgcttatattagtctcctcatttttacatgttgacaacaaattccagtttttaaaagctagtctatgggccaatcaacacgcatctgtgaaatgtctcttttgcaatctctggcctacatcactttgtaagattaagaaggtctcaagcttcttcagatgcaaaatctaagcttgcgtaaatcttcagttttccatacaatacaggtttcaggcaaaatagctctttgacacaaatgacagtcctaacaacaaattttattatcatgcttaaatatttaaaatattgaattacctcttgctacttaaagaaacaatacagaagtaacctgtactgcagtctaccaagtgtcaactcacctttactaaaaagagccagattagtggtcagaaatgctgcatatcttctgattataacaaataaaatttgtaatacctttttccttctccaaaacgagtcagatgagctttctactcagagtccacaggaagtcatggtatttttctcaaataccagaaaactaataaaatatcatggtatttttctcaaatatcattagtatagacaacttcatctacaactttacccagtggtaaactgcctatcaagacaaaacatgataacctttttagaactagtaatttgtagcaaacacacacacacacacacacacacacacacacacacattccccatacacagaagcgcatgggaggtggggctataatgttcaggtaacatgcaaaaatggcaaagatataatcaggtaaaataattataggataatgagaatctatctataaatcagataaccagcccccacatagggaaaagttgactcttccattcccactatgaacattaacgacttcaagatcaagaaagtaggcacatgacataaaataagtattaaattttgaagaaatcctggcattcagatggacagggtttacggaagaaaaattctctggtaaacacagaaacagtaacaagataaccaactcagatatctgttcaagtaccctgcccaagaaattaaaattactacatccaggacttgcccctccatcttctctcccagcacgcccattcaccatttctctgcacttattttaggatatagaggatgggtttgaaggatgtaaatctatcaattatactgcactttgttcagttctggaaaaaatgctcaatgaaaagaaggtaaaactatggcaaaactttttttattagtaataaatttaactgtgttaaccttgttttccatgacaaaataattacagaatatggacaataatagagatctgcaacatagaagccacaagaggattaataattccttctaagttttggtatagtattgatctaaaaagcagaattttcataactgcagctaattggaagtcacattatttattatcatgggactacagaaagcaaggtcagaaagaagctagacttatcatccaatttaatatccagtttgcaagtagttgctaactacagcttaaaatatttccagggaagttatatatccatgtgaatatgaacgtgttgtgccgaaaacacagaaaacatgcagttcccatatagcagagggtgatctgccattataaacactcttaagtcaatgcttgtataggaaaattagcagatatttgcaaattcattttcgggtcactgaaaattaaagccagaaagcctattttcatccatgtattgaaaaaaaggcacatgagattatttctgtagtgatgctgcctgttcttagacttattcttagtcacatatgaacattttcacccaaatactggccaattataaacaattaagacatgcattactgagctatatattattatgtttgaggctgtagccaattggctacagccaattaatattacatttataaagagtaaaaagttcaagaattaatgaactttaaccaataagtttcagcagagttagccacaaaacacttttattaggcccaaatgaagtatctttcattcattaatacagaacctcagggcatacttgcaaatcagaggttcaattatcttaaaaaaaagttcctaaggaaacaaaaaactttccatttttgttctgtaaactgctcctaaacaacaaggtattctttcttttttggcattctcttttctccctatctcaggacatatttacagatgcactggctgctttacagacatgctaaaagttcttgctgcagttgatcaaagttggaatgtctgaggaaattactcaacttagacagcctggaattatatctagccaaatagagcactctactttcaacatgtgttaaagtaatattttagctatcctggatgtaagttgagagaacatttgtttgcatcacattctgtgaacacttgagtcaaacatagtatgttgaataccaggttttagtatctgtgacagttcatttttttaactattcaatttacaaaagacaacatacttcatttaaaaaaaaaaaccctcacacaacaacatacgtagtagaaactaaggctttttatgatcttctttaagtgcccaagcttttctggaaatgtcagaaaaaattgaaccaatgttaatatttgttcattagagcatttgttaatctgacataaaatattctgtccaaaaatggaaactttactttttcttgcactgcccactatgagctcaagatatttttattatttaaaatattttcacaaaaaggcactgcacatctgcactcacctcctttctattactaatctgcctaatttacaagggcacatacaacataattaagcagaaaaatgacatcacaacagttttcacattttttaattgaaagccacataattacagtacagttacttgtcaaaaacataacacaaatctctaaaatagaatattggcttcaataaactttcacatttgaaatagttttaaactttgttttagttggattctttatgatgtccaggaagaggttagttagcacacacagtacctgaaattgtcctttccacatgagctaaaacagaaaagacaaatgtagctgtttctccagtactaccaaatttggcagccacttatacttcccttcaacctaaataattataccttttaaccatattgacaataatatggaaacatcactcaagaagaacctaacagaccatggaattataataatttaaaccatccttttatcaaatgacatggtcagaactggagaggaaagagggatactagtaacttttaagtcctctactaagctttttttaataaaaagacttccaacccactagaaaacgttgcttacatttgcacatactccagaaaagggaaacataaataaattccccactctgaatgtgttatagtgttgatgtcctgtgttacagtacatgtgtgtcatgaactgtcaggaaatgtgtacaccatgcaggaggctggaccctgagtgagaatgactgccagtaaaaactacctggcaatgggaatggccaaagaacttctgtcaaatgtctaagattcagctttaagctgatttctatagtgaggtacaatccttcattattctaacacttaggtaatgaacacatgaaagaaagagagagaggagagcaagatttagaatcttgatgagaatctggttttttttttttttttttttgagacacagtcttgctctgtcacccaggctggagtgcagtggcacaatctcagctcactgcaagctccacctcctgggttcatgccattctcatgcctcagcctcccgagtagctgggactacaggcacccggactacacccagctaattttttgtatttttagtagagacggggtttcaccgtgttagccaggatggtcttgatctcctgacctcgtgatccgcccgtctcggcctcccaaagtgctgggattacaggtgtgagcaactgtgccaggccgagaatcttaaaaattatgtaacttaagtttcttcctcattcttttccagattctgaataaaggggcgggtttgagagatggaaaaaaaacttaaaatcaaaaggtagtctttgaaattaaacaccatcataccagcctgtgattttccaaacatagaaaaatcttattagcctacatccttcattaccaagagcaaaacagacaaaaacagtagatgttaaggtataaacctgatgccgcaaatgacacagatccaaacaaacacaaatacacatacacacacacacacacaatcattcaaaaatcacaacactataaatcctaggaccaatgaatctaattaaatcccttttgtgtaatattcctattaatataggactagaagacattttacactcaaaaatccaaaagtctaaattgtttccacgtagtcaaaacacaggatttccactaactacaccacgctaccatatatggctttaggtagctcaaaactgaattccaaaatgaagtatatttttgagagtaacaactcccagagaaaaacaagggcatacatagagagttccatgctcctcaggaactgctaggtctgatcttggaccctctcttctactagattcagccaggatgaatatatctgatgagatccacatacctcatcaagaaatggccggaaaagcctaaaatcatttttcatgttcccattactacaaagtaaaagcatgataagctctatacttaagtgttttgacttggtcaaaagctaacaccgggtttgctaccatgtaaaattaatctagaatgtaatcattgattccgttttctttttattctttaaaaaaaaaaaagggcagttggggaagaaatcactgcttttccattaagcaggtactttgtgctagagagcatgtgtcatttctagggtctcagaaaaagaacggatgtatctatgtgtaaacacaaacagtaagttacaagttgccccttagtactaaaggcaagaatcagcatcagtactcaaaaaagtgttttaaaaagagtgtaacttacttttactgtcccaggctaaatgggctctgtctggtgcttctttgtctgcacatggccacccacagcctgtcttctaattaaatcaatgctctagcagcagaacaagcaaacaagttgcctcccatctgcgtacagctcttcaggatacatttcccttgttcagaaggtggaaattcttgggagaggtgattttctctgcctcttcacaagaaggacatggatacttggctggatgcaactccatgaagtgtaactgtgtgtgtacacctcaaaaaataaaacaaaaaatgcagagaaacataaagactccataaacagctggaatacacagaaatactgaagcaccactgggaatactgctaaacagacaggcaaaatagggtctttgaaataatcaataataccaagtaaagaaaaaaaacaggaaaaaagagcacctaaggtcaaaactcaaatttcatgcaatgaaaacattgtaagtactacaaaagaaaaaaggtaaatcttctacttcacatacatagaaacacatcccactccccttacagagaataaaagatattatcaatggaagaaaaaaatgagattttcaagggtggtaggtctaaaattagactcaccagccacatcatagttaatgagcacttacgtaaatgtgagctaaatgcatcaagctgtctttccagtgtggtcagctctactggggggcagggggcgctggggaaagagcaagggaccactctgcttatgaaaatataatttctacaaaaaataaaaatgtacaggaaactggagatgctcgtttatttaaataattttaaacttcccaaataacaaaaatgaccttaaagcagatgcccctccttttctgcaataaaaaccaactgactgaagtagggtagggagcagggtgtggttaagcatctgctcacaagaaaacttgttataagtttggtgaggtgaaaagggaaattatcggcccttcccaatgtccccttccatcctaggtatgcccatatgccatcaggaagccacaccatctccatgaccactaggcatttcaaggactggcaggccttagaagtttcttctatccccctgaggcacacagacaattccagccagaagtatagagcccagggaagagaatatggcctattcctgcagctgcacaagaggcctgggctggggtccgctcacaatgaactactcaagtgtgaccaacattcccattctggagatccctgcctgccttaaagaaatgaagagctagctgggcacggtggctcacacctgtcatcccagcactttgggaggccgaggcgggtggatcacttgaggccaggagttcgagaccagcctgggaaacatggcaaaaccccatctctactaaaaacacaaaaaaaattagccaggtgtggtggcgcacgcctgtagtcccaactactcaggaggctgaggcatgagaatcatttgaacccgggaggtggagattgcagtgagccaagatcataccactgcactccagcctaggcgacagagcaagaatctgtctgaacaacagcaaaaaaaatgtagagatacagacaaatgtataacagtattatacataataatataaatatataatgaaaatacctactttctttctcttacataccaaaatatcagtcacctgaataagttattcttaaaggacttccctagagtttacaagcaagcaatatttgtattacacagagatccaagacaatgaactgtttttaacagaatgactaaaaacttggcccaatataatctcccctataaacactaaagcatttggacaagaaacgagttttaaccatgaattagcatctcccctgaccatagggagctttaaagcatgaatcaagtgaataaaaaacttcacagtccatttttaataacagaagttcaacaaaagatttttaacaaaggaacctgtataatttgccttttactatataaaatgtaaaagctattcctatcactattctttttttttttttagacagagtctcactccgtagcccaggctggagtgcagtggcacagtctcggctcactgccaacctctgcctcctgggtcctggttcaagtaattctcctgcctcagcctcccaactagctgggattacaggaacgcgccacaatgcccagctaaattttgtatttttattagagacggggtttcaccatattggccaggctggtcttgaactcctgacctcatgatccatccgcttcggcctcccaaagatccgtccacttcggcctcccaaagtgctgggattacaggcatgagccaccgtgcccggcccctatcactattcttaatacacagtattctacctaccaaaataatcagttttcagaatgaattaaccaaactttctcaaaggttacaacaagatcttcaaaacctctgccaaattcatcagttttctcacaaaagattataaattaccttccaaaagtctgtcgttcatatttcacctattattactcattagacttttttaaaccaggtcttcatactttataagaaaaacaccaatgtgcaaaatgagcttcaggcagtattttataaatagttcattttctatcagaatccatgaaacactttctactttagaaacaatcctaagaaaatggtagcatcatgactcacccagttctatatccaattttctcaaaaaagaaattcacatcacaagttacaccatgtgaaatatgcaaaattatggtccagaatcttaaatccacgtcactacttgatccaaaactatttcaaaggcagccaaaaaagcaactgtcatccaaatgtatagtcccaaatatgaagaccaaattctttcacaatattaatcttctctgctgtgagtgaaaccagagttgtaccatccagtgaacagaattcactttctcatcagttattaagataatctcaaaaaagctatatgaaacaacaggaatgaatcgatttaccaataaatcattaaaatatgatctataaactgacctttccattttcttccctgcattttgaagataaacaaaatatattttggagtaatatcatttgcatttccacactgcagaaaacctctcatacagaagcagccaccttccctcccaaaactctaaaggaagaaggtggtcaatttaatagataggaacttttgcacccgcccctcctttacttaaatgaagaaaacacctcattctggtgtccagaagtgacagtcttaagatgacatcatttgtctgcagtggtggtaaagaaaaataaaaccacacaaaattatcagtctctaagaaaagctaaaaaatgatatgtctgcataattccctttactctgtgtgtgtgtgtgtctctgtggtatttacacacacacacacacacacacacacacacacacatacatatacacatatttcttttgccttgtctcttcctcttccccatgcatggagttaagaacggtgtacttttcactatttgggaaaatacaaattatcacattttttaaatatacagccagatacactttctaggcaataaagaccattagaacatttcagtcatttcaatccacaattagtatttaaggaattcacatcaatttcaatatctgcctaagtaataatataacgggcaagtttttaaaatatgtttatgtattgtttccttaagctcagtggcaagaacatcattttttaaatcaaaaagtatatcccaaagtctaaagagaaaagaacaatgactgtttgcatctgttcaataatccagacatgacttaactgaatagactgaccaaaactaaagataagtgtttattctcaaattaaatataacacattgttaatacagctctccagaatttttctcagcacttttcagtattctgaaaggactcaatactgctacttatatttctctaagtacagcaaatactagaatccaatcttcttacatctttccattgacccaagctattacaatactaccccaactgaactccatctgaaaacctatcctgttttaaggtaatgaatcacaattattcaaggtgagagaaactgcagggggaagtataagcatgatttccaacatacttcttaagatttaggaaaattcttccaattagtgtaagcttaaccttaaactattaacatatatttcattcaaagagtccatagaaaagttaattgttagataattaattgaaattcttccacaaatttaataattacaagttgaggccaggcacggtggctcatgcctgtaatcgcagcactttgggaggccgaggtgggtggatcacctgagctcaagagttcaagaccaccctggtcaacatggtgaaaccctgtctctacttaaaaaaaaaaatacaaaaattagccgggtgtggtggtgcatgcctgtagtcccagctacacgggaggctgaggcacaagaatcacttgagcctgggaggcagaggttgcagtgagccaagatcgcaccactgcactccagcttgggctacagagtgagaatccatctcaaaaatatatatataaaaaataaaataactaaaagttgaggtgtgggatgtactaaagtcacttggggaagaattctatgctaccattatccttatgacttattccaagcaaaaataatagaacaagaaatttttttcctttaaattcatatccacattcttaaaaaaacacaagttatccgaaactgtaagtccacctactcaggagaaactcattatttcaaaatgtatttttatcatttttaagtataaataagtaaaccccttaaaagtaggattcaacactaggggaaaatagaatgaaatagtaaacatgatatataagtatgacttaggaaaattaaagttattctaagatgaaaagagaaacttaattttattcagttttgcattcatagttgccattctagtatattctccagatactcattaaccttctttcccagacctacagtgactccatgaaagtaattttcaactaacaattgaactagttaagttagatgaagccctctttgtgtgtctgttttgagtaaaggtaacatttggtggtaaatacatctatcttctttcttatgtcatttttctcctcttatcctcaacatataattaacctttctttgatgctgtaaaacttgtcattaatagttgccataaatattcatctcatacataccatttccaaagcacctcataactgtaataattgctaacagttatggggtgcttactacgtaccacacactgttctaagagactgtcatgtattaggcatatactaactcagtttatcttcacaactccatgaagtgggaattactatcctcataaatagggaaactgagtcaaggacagactgtgccacacccacggacacatggctaatgactggtagagctggtatgaaatgtatcagtcatatcaggagggcatcacacatccccatgtcagattcaatagaactaggtgcccaccatatactttcaccttccttgactacattaggaccaatctgagaaattaaaatctacaaagcatgatcaaaagctcaggtccacaattaagcaagagaatatacagaaagctcaggtccacaattaagcatgagaatatacagaaaacacggctaggactaatggtaaacacctgggcaattttcacaaggaaaggcatgaaagggtaagtgccttggtatgagagcctaaatacaagggccacaacccagtcaacctggaaatgtcgactttatcatctcctccctcaaactcatcattgtttttgtcatcatgtcttacttgattccctaagtagtattctcaaccagaaaaatatttttcacaataatcctctcaactgattgacacaaatctatcttctccaagtttgagcagcaagtcgatcttctgaagacctcaatatcccctgcacaaattcatcaaggttccaaatcaagagaactgagagaacctcactctagagtataaaaaattatggcaaacgtgagagcctccccactcaattattcgatgtccacagtaaactggggacaaacctaaccataacactgggacaaggcacacttcacagcacacaatttcagggtatatatctaactgttaggttcgtgaagaatcttccccttctactttaggcacttctagacagttggaatttttcttttatttttaaacaacagaatatacatcactttttgggggttaacttcaaggattttcctactgaaaatgggaaacttaagtatccaatccttaacttttgtattcatgaatctcacaaaaaaaaaagaaaagaaaggaatttaaccagcttttatattactcagaaaagtcaccaatgaaaacaacaatatcataggcttcttcataactttgctaatattggtgggaaacactgctcatataatttatggttgactaactcaacaatttcatgtcatttaagaacaataaagataaactcacaaatattttaaataaaacagagaaaagaaatacctcaagttccaccagtgctgcagtgactgcgtcagttgcaagagcaccggcctgcagcttttcaattgcctatgaaaccaaggggagagattattcattgcaaaatcacaacttctcaaactttccaaaagcttaaagaagtatgggagacacttagattaataaaaattgaccactagttccattccatactttaagacataaactactcagattaaaaacaagcaagtgtttatattcaggttaattggtaatatggctcacttaatattattcaaattaaaacaataaaatctagttattaaatgaaaagtacaaggaatttagtaagcttcattcattgtaaggcaattcaaaatagccacagaaattgtatgacccagtttggttcaaatatcctgacaattcatattttatacagaacactaaatctcaaactaatcatttctcctcccactgttaatactctccatacttaaaaagaagtgactctcagtcacaggggcatgccagaatctgaggataaaagcatacatttgacaaaaacattttggatactataatgtaaattctaaatcaagatgtatcatattattttgtaatataaactacacagactaaaggtctataaaatcacctggccttgagcataaattaggagaggaaaagagagagaaggaaaagtcatttataaatgaattattaacattccaatttagtcaacaaagagaaaactcaaaaactaagaactgtattcctaattaaacttttaagaagtttattcattgtaaatattaaagaggctaagtatacgattcaaatgtattagatttctaggactatagttatataaaatttattttcagatgacagaaaaatttcacactttgaaaaataagaaaaaatataaaatagcttcgagaacttttagctttattattacaaatttcaaaagaacaaaatccctgtaacaaaatattcttatttataggacttcattcataagaaaaagcttgaatctctgataaagtataatcttctttttaatgttacgtaaatatcaatgaaaagagcagagagagagagacgcatatttacttgatatataatattcaactagattctatttgcataaaaagtaatggaaggtttgcctacaagactagtaagaatcaaaataaaaacaaacatttcttctgagtccattcctgtccccacattaaatattcaacaatttagcaaaacctcaaaaaccaatgggaaaaaagcacaactgagtacaagggcaaaactgaactctggaatgacaatgaacttgctatgatacaaactacatgatgaaaaacagaatgaaaaagtataggaaagtacccattttaatttttttatttatttttttcccttcatggaaaaacacattgactgcctttaagctgttttctctatccttctgtctacagaagttcaacatcgttgcaaagattaaaagagatatgattgtgtgcccacaattacaaaaatacagactttaatctgggaaagtggggaaagagctaagcaacatgtggagaaaaacacaaaacaacacaaaacgatcccctacaaaaacaagcaaaataattttgtagtccaaactggaagactgtcctagaaatgaaacttttaaatgttgaatttcaaggtaaaactgctttctgttcaaaactgcaatgcacagatcatacacattgtgttcataccttctgacaagctcgtttgcatacatgtttatactccttggctttggattcagaatgataacctgcacctaaagtagaaaataaaatccagttaattattaaaatatcaagagaccttgcttatgttatataaatactccatataaactgatgctgtcctagtaaaaaacaaaactattgccctaactgtatggcgttttatgacttcttactccagtgtaagcctttttaataccatgccttatctccgttttcaaaagctcttttcctgccaaaagccctaaaaatagctcatgtccccaaagaggcttcaccaaggtcccctcccctcttcttttcaagaacctctttccaaaatcaggagttcttttgatctgcagctaataacccagaaggtgtcggggacagggtccctccgggttcctctctgctgactgtcagaaagcccctgccatttgggaagttactgtttcaaatccagaattcataagagtaattcagaaagctgaatcgcttctgaataacatttgaagttgaggtgtcttacatctcgcatgtccacaaccaccaccaattgcaccattcctaaacaaacacttcacatcctctcacccactagaatgtagctcagggtgtctctgaaagctaagtgacagcacattcatgactctctatgagaattcctggtggtctctgtcttttaatcaaatacccaagaactgtctcaagagaatggctctgaataaaatggtttccctacaaggatacataacttgcttagttagggacttaagaataatctaaacaagaaggaaacaaagacaagagcccttaaactctcttaattaggcctctctctaatcaaagttcattaatggagcactgaaccacctatccctacccacccctaaagccccataggggtccaatgtatggaaggttaagaaatacacctctaggccaaacacagtggctcatgcctgcaatcccagcactttgggaggctgaggcgggaggatcacttgaggccaggtgtttgagaccagcctggccaacatggagaaaccccatctctcctaaaaatacaaaaaaagtagccaagcatggtggcacatgcctgtaatcccagctactcagggggctggggcacgggaatagcttgaacctgggaggcagaggttgcagtgaaccaagatcatgccactgcactccagcctacgcaacagagtgagactttgactccaaaaaacaaacaaacaaacacatgttttccattttaaaaaagacaaaaacagaaaagctacatctctaggccttaggattcctacaggtctgcagactctgacacaaacctaacctacctttcctcaaggtagagaaagcactcacccacgaaactgtcgtacaaggagccaggaaagcagagatgcccaagccaccagaatccacaatacacccaaatcctaaacctgtttctcaagagaactctgaacattcacagagcctgtgccaatatttaataggcctctcttcatggttctctaagaacaggtgatctcaagttggctgtcttagatctcagaggccacaatctttcagcagcatttcctaaagcatgggatactattccaaaaagatgacttcagtgtaagggacaagggcatttaatagccttaacatgtaaatccttttgaaataataaaagtctcagcagagccccccccccaccccgtacatctttaattcctggttaacacttgctaatttccctgtttaacaatggaaaggcaggctcaggatccaagccactgacaaataggatctagttaaacttcaattacagtgttttgtttgcactgtgtttaaagttattttctctttatggcaagtgatactgctatttcatttaagtaaccataaacttcatttttcaaatgttaagattaaaaagcgtttagttgtttgaatattagataaaacagtataggcagtgggaaaaatcaagaatctactacatgaatcacaaaagtttgggcaagtctactctagtgctaaaaaaactgctctacactggacaaggatatgaatttttgacccttaaatgtgcaagatacacgcttttgcataatcaatcactctttctaataatttagaagtgagggtcacccttaattcacacaatatcctatcataactcagagttcctactcttcttgctgacccccagcaccaacctttacctgagagtatgaaattaaataattcaaagttaaaactgttgaaccagctgggcacggtggctcatgcctgtaatcccaacactttgggaggccgaggcgggtggatcacctgagtcaggagtttgagagcagcctggccaacatggtgaaaccccatttctactaaacatacaaaaattagccgggcatggtggcacgtgcctgtaatcccagttactcaggaggctgaggcaggagaattgtgaagcttgcagagtgagccaagatcacaccactgcagcctgggcaacaagagcgaaacttagtcttaaaaaaaaaaaaaaaagttgagccattaaatcattctgagccttgaaaggaatgtggctatgcaccctgagtcacacaacatgcagctgcaacttttgcctttttcctgtaaataattaggaagaccaaacaacaccagagataagaccctctcagatcactgccccttctcacaaagtaaaaagtaatcttccttaggatgtagcaatctataaccaatcaaattgctgtaacttatgcactggtctcctacggaaaatgttaccatcctgctaaaatttttctatctctacctacataaatgaaaacttaacttctccactttggaacacagaccccatttgtttggagtcagtgtttcccaggtggacatcctcaagctttgtgcatgaataagctctacctttaatcatagcttctgaattccattatttaaggttggcagagccattatcatctagtctgtgtctaagacaggagggacagggtcataatagttatagaaagtaaggctttccaactaattgaagctttatgttattgcttgttacaactttcagacctttcttttacactttccaaacactcactctgaatacggtaactcactggtatcatggaagataatggaagatgtaccatcaacatagtgtagtggaaagaacacagactaggagtctgaaggcagaagctctagtcccaggtctacttttaactggattatttctgtaaatttacctcacctccttgtaaaagcacctgtgagaaaatgggattaaacctggtttctggttttttggatttgtttagatactctggattagattcacataaggcttctcgggttgtccagtctagatatggccaaacgttaatggccaggcaggacaccagtctcacaagaagaaacatttctactcctcattccatatcaaagttaatcctgctgtcatcttgcttgactacccagggaaagttaaaaggaaacccagacattctttctctcttcatggaggtcatggaaagtagactctgaatacaagaaaataaaaatggccaaaggaaaaagagcctgctgaggaaacctgggcagagcagcactgttctgcaacccaagaccttttaaagatgggaggcccaggggatgaactccactgtgtctgtcctcatggtcctctgaagtagaaagatcacaggctgacacagcatcaaaagcactagactgagacataagggcctacttaggtgtttcttacactggctctagcaccaaccaccagtgtctgaagtctcttaagtcacttaatctctctggtcttaaggttcctcacttaaaatattaagagggtgggccgggtgtggtggcttacgcctgtaatcccagcactttgggaggccaaggcaggtggatcacccgaggtcaggagtttgagacccacctggccaatatggtgaaaccccatctactaaaaatacaaaaattagccagacgtgatggtggacgtctgtaatcccagctactcaagaggctgaggcaggtgaattgcttgaacttgggaggtggaggctgcagtgagccaagatcacaccattgcattccaacctgggcgacaagagtaaaactccatctcaaaaaaaaaaaaaaaaaagaaggtgaaccagctcaaagattgtgtaataattatgccctaagatacccacagtctcacatgggaatcaatacaattttttcagcaatattttattttattttattgagatggtgtctcggtttgttgcccaggctggagcgcagtggcatgatgtcggctcactgcaacctccacctcctgggttcaagcaattctcctgcctcagcctcccacagcaacattatttttaaaaaacataaaccagagttcaaaaattactttgtctggttttaatactacctaacctaaatacatctattacatagagttaaagtaaataataggttagggaagtgaaaacctaggaagagctgccattctaagatcttctaactggggagtaaagagggaggtcctcactatatccaagtcaaacaatcgctttgcttccaattcctctctggcagttttgcctcctccaagtgtgaaatgtgattctcagtgtacttcaaggcagaaaaagaaaaatcaacattattggcatcttccaagccatccacaaagcttacctgcatgcaccaacacaaagcctcctcgtttctctttataggactgctttgtttccaactctttggctgttattttaccagccgaaacctgagatgatctggaaggcagcccttctccagaactcatccccttctccatggtcattctccaagattaccatcttctactgagaaaggggcatacttccatccaaaagtaattgcaggagaggaattaccctaaaggaaaacaggcaaagatggtatacatttctttccaccaacacataagttacttacacaaattcatgcaaagataatgttcaaaaatcctatttttaagttatttaattgagcaatacaaaaaaggtatcaaagctatttattaaaattattttttcttattcccattgaagtcggataaaattatttaattgggtaatataaaaaggttagaatttaaatctctctgtccactgatagtacctgcttaggggcgagcgcagtggcttacacctgtaatcccagcactttgggaggctgaggcgggtggatcacctgaggtcaggagttcgagaccagcctgaccaacatggtgaaacctcatctctactaaaaatacaaaaaatttagctggtgtggtggcacacacctgtaatcccagctacgcaggaggctgaggcagaagaatcactgaactcaggaggcagaagttgcagtgagccgagatcgcaccactacactccagcctgggcaacaaagtaagctctgtctcaaaaaaaaaaaaaaaaaaaaaaaggagtctcaaaaagaaaaaagaaaagaaaagaaacataaagaagttacttagctgcctattccaaaataaaaaaaagcaggttactcagaacacactctacatcccagtgtttattaccagcccacaagagagtattattttattcatgttagttgctttataagcacattttcaataatcaatatgtgtagttttcacaattcttttctagttcctcatgttattttttaaaacaattttatctgctaaatcaagcaaaaatttgagcttttatttttaagtttcaaatttgtttgaatgtttggttttgggtggtatttggggagttttttatttgtattttacataagtattgacccacaatggattgaaaatttttgaaagctggtcttttataacagagatagtctgacaagcactgttatctggcatttttaaattcccttaattcttggtttaagagtctatttaatttttattatataacattttatttataagacaaatcatttaaaatcaattatatatacacatcgttgcattcaaatatttatacagattcacaaatgcaggaaaaaatttttactacaaaagtgctgatttttaattgagtaacagtaaatttaaatgcctggttttgtttttgttttgtggtggtgtgttttgtcttcctaaccatgtttttcttccaaagatttcacaagaatctgcctcaattacctttattttcttttggttatttctcacaatatttctctgaaataggctatcatttagccatgtatgacttgacaaagttgatttagtggttcatctgtcagcctataatgccatcatgtctgtatcatgccatgatatttggcccagccatgaaatgagcttgggaccattagtctagaagcataaacatagattgaaaactcaggctttggaaaattacgagcttcagctaaaacgaaaacacatctaagcagtatggactatgaaacctcaagcaactttgaatcactgtcatctgagatattttttcataactaagaaattataatatttatattttgtaagaaaatactggccaggcgcggtggctcacgcctgtaatctagcacttcgggaggccaaggcgggtggatcacaaggtcaggagttcaagaccagcctggccaacatggtgaaaccctgtctctattaattagccaggcatggtggtgggtgcctgtaatcccagctacttgggaggctgaggcagagaattccttgaacccaggaggtggaggttgccttgagctgcgatcgcgccactgcactccagcctgggcgacggagcaagacttcgtctcaaaaaaaaaagtacagatttccttattttttggccgggcacagtgactcacgcctgtaatcccagcactttgggaggccgaggcaggcagatcacaaggtcaggagttcaagaccagcctggccaacatggtaaaaccccgtctccactaaaaatacaaaaagctgggcatggtggcgcgttcctgtaatcccagctagtcgagaggctgaggcaggagaattgcttgaactgggacccgggaggcgaggttgcagtgagcagagatcacgccactgcactccggcctgggctacagagcaagactccatctcaaaaaaaaaaaaaaagaaaaaagaaaaaaagaaaagaaaagaaaatacaaacataattataacatcaacattttatatggtttgatgtaacaggcatcttaatatatatgagagattttaaagcattgcttctcaacgttgtctaaaaagaaatgtggaaggtgattaatattccatttcttgagcaatctactctccctcagagactatctgaaatatatttatttagcaaaccatataatctcaacaaacccctccaaaaatcctggccctaaagttccactggactgggaaaggaactcaactaaattaactatcaatacatgactctatcctccaactcccaatggttactgaaatattttttattcagttagaaatgaagcaacttctactccaacatcagtttttgtttaactcagaactcattaaaggtctgacatctaataaataaagagtgccaacaaaagacaaaaacaaaaaaagggcaaatagacaaatctcagtttgcagaaaaattacataatagcttaaccagacaaaaaattctaaatctcactcgaaagatgcaaaataaaattacacttaaataccattttttaacttagattgacaattatcaaaaaataacatattttgagagtacagaaaaaccggagctaagttgctagcggcagtataaattggtacgactcaacaacagcaatttggcaaaatcaatcaaaattaagatatagcccgaaaaatgtcttgatggaagtggttaaaaataaaagcagccattggaaacaatgagaaaacttgataaacatatatgtaacagtctcaaacatatttgctaagtaaaaaaggaatggaaataactaattttttaaggtatggtacagaagtatttgcagtaccatatgcaaagtataaatctggacagataaacaaaaaagtcatacaatactgattaccaaaggagatttggataactaataacaaaagatgggatagaaatttcactgttcacccccttgaaactttcgaatttgaaccatctgaatgaattatttataaaaaaatttttattaatttattcatttacgggaatactaggtaatgagctaagccaaagaaccaaaatagggcaagcatgtttctctgagtattgaacttctgggatgcataagctacagggaatccaaattgagggggaaggaaatcatagtatttggtctttacagttaagatgagggagaaaaataaatcatgaatgtagcttatcatcaaatatctgtgatgtttttatcatatatgtaatcattgttacaaatcattatgtgaaactggctaagtgtacttaagtcaatacatagatccacaagaaaaatgtctaatacttcagctaacctttgaggtaacactcaacacaaaagatttccaatgaaaggagaaacataggcacgtaacaggtttagaccaaaaaaaaaaaaaacttctatcaatcactttaataatggctttatttctgacaaaaatgtttgaacacagacattttgcaatttcctcctagtaatgatattaaaattcatcatgattatttctaaataacactggcaacttgtctatcctctgcaactgttgctcaaaaagttaaacagagttatgctatgacccaagaattccatttctaggtatatacccaagagaactaaaaacatatgctacacaaaaacttatacatggatattcatagcaatattattcacagcatccaaaaacaacccaaaggtccatcaactgatgatgaataaacaaaatgtggtatagtcacacaatggaacattattcaaccataaaaaggaatgcagtgctgacacatactatgtcattaaagaatattgaaacaatgaaaaaaacagacacaaatggccacatattatatgattccatttatatgaaatgtccagaataagcaaatctaaagagacagacggtagatctgtgattgcttagagctggagggatggaaggtagggtgatggagagggactgctactgggagcactttctttttgtgctgataaaaatgttctaggaccaggtgtggtgggtcacgcttgtaatcctagcactttgggaggtcaaggcgggtggatcacctgaggtcagaagtttgagacaagcctggccaacatggcgaaatcccgtctctactaaaaatacaaaaattagctgggtgcggtggcgagcgcctgtaatcccagctactcgggaggttgagacaggagaatcgcttgaaccagggaggcaaaggttgcagtgagtcaagattgcgccactgcacctcagcctgggcaaaagagggaaactccgtccaaaaaaaaaaaaaaaaaagcctgggctcagtggctcacacctgtaatcccagcactttgggaggccgaggcaggccaatcacctgaggtcgggagttcaagaccagcctgaccaacaaggagaaaccccgtctctactaaaaatacaaaaatagctaggcgtggtggcgcatgcctgtaatcccagctactcggaaggctgaggcaggagaatcgcttgaacccaggaagcagaggttgcagtgagcagagaccgcgccatcgcactccagcctgggcaacaagagcaaaactccatctcaaaaaaataaaaataaaaaaaagttctaaaattgaatttggtaatggttgcacaactctgtgaatacactaaataccactgaattgtacactttgaatgggtaaattgatacactgggtacattttaaatgggtaaactgatcttattaagctgttcgaaaaaaaagaaaaaaaagtcttgctccccataaattgtatctttcccaagttacttaacccaatggcattttcttaatcttctgcttacaacctttgattctcttgatcacctgctttccttggcaacacacaaatctactaccctagttcttcataactcacctctgaccccaactgcaaatgtttccttcagcaatttcttttttttttttttttttgagacacagtctcgctctgttgcctaggctggagtgcagtggcgcaacctcaactcactgcaacctctgcctcccgggttcaaacaattctcctgcctcagcctcctgagtggccaggactaaaggcacgcacccccatgcctggctaatttttgtatttttagtagagacaggaattcactatgttggccaagctggtctcgaactcctgacctcaggtgatccacccacctcagcctcccagactgctgagattacaggtgtaagccaccactcccggccaaccttcagcaacttcatctactgccaacctttcaaaactatcctctcagcaaatcagatgattcctaactttatcttctgtcttacctatagccacaagttttatggatagctcaatctaggtccacctcactcttggcctaaccaaaacacgctctgcagggactttcatggcactaatttaaggtctaaatcttgcctcatctctctaaaagatggttttattttcctactgtatgtgatgacactgtttttttttcttacaccactttgaaaactaccacgtcctgttgctgtggtgttaaagtttttcaccgtaggtttgcttattctttaagaagcagttgaaaaaggaagtaagtcatggaattcatccatcttacagcaaagggctttgatagaaatccagcccttaagctattacaactcatgaataaataattgtgttgttgctttttttttttttttttttttttgagacagagtctcactctgtcacccaggctggagtgcagtggcatgatctgaactcactgcaatctctgcctcccaggttcaagcgattcttgtgtctcagcctcctgagtagctggaattacaggcgcaggccaccatgccgggctaatttttttttttttttttttgtatttttagtagagacggggtttcactatgttggtcaggctggtcttgaactcctgacctcaaatgatccgcctgcctgggcctcccaaagtgctgggattacaggcgtgagccaccacacccagccttgtgttgttgcttttaacatcgtgatattgaaggtttaatgcctcattaaatgaactccaggacatacttaaattcatcttctaaccagtaattccacttctgagaaaactttctaccaaaataactaaatagagaaaaggttttatgccttttataccatgtttaacacaggataatttagaataacaaaaatctgggagcaacctaaatgtccaatacagaaaaacggttaagaaaacaataacctacacttttatgatcaactgattttcaacaagagtgttgaaatggtttctaccattcaatggaggaaaggacagtcctttcatcaaatgatgctagaactggatagccacatgcaatagaatgaaactgaactcctacctcacatcatacagaaaaattaactctaaatatcctccctattgcacttgacaagtctttgaaaaaaaaattctaagtagataaaggacaccattcaagaaagtaaaaggacaacccataaaatgggagaaaacgcaagaaaatattgcaaatcatgtatctggaaagggacttacatttagaatatagaaagaactcatacaactttaatataagacaattcaatttaaaaatgggcaaaggaattaaatggacatttctccaaagatatacaaagggtcaataagcacattaaaagatgctcaacattattagccatcagggaaatgcaaatcaacactacaatgagctaccactttataagcactaagactgctataaccaaaaagaaagataagtgctcccaaggatatgaaaaaatcagaacccttataacctgctggtgggaatgtaaaatggtgcaaccagtttggaaaacatttggcactcactcaaaaagttaaacatagagttaccatatgcccaccaattccacttctaggtatatactcaagagaactgaaaacgtatgtccatacaaaaacttgtacacagatgtttatagcagaattattcaaaatagccaaaaagtagaaacaacctaaatgtccatcgaccgatgatggttaagcaaaatgtggcatattcacacaatggaacattacccatccataaaacagaatgaaatactgatacacagacattgatgaaccttgaaaacatactaactgaaagacaccagacaagtgaggccatatattctatgattccatttatatgaaatgccagtataggaaaatccatagatacagaaagtagattagtggttacaaggcctgggagagaaagcagagaatctaatggggagtgactgtcatgagtataggatttcttttgggggtgatgaaaatgttctgaaagtagatagtggtgatgggtgcacaactttgcgatatgagaaaaagcactgaaatttacaattttaaagaataaattttatggtgcatgaataccttaataagactttctcaagaggaaaaaagacaatctatccgtgcaatgaacacaatgtatgtaactatgcctcttagttataaccgtattttacacgcatacattatgatcacaaataggttaatatgaataaaatattagaaaaaagatcaaaatgctgggttggcagaactataggtgatctcttcataactatttctgcattttccagatgttccttagtaagcactgctttttgtaagtggtggggaaaagttttatttacaacaaaaaagataaattattaaactcctaagaatataagtaaaaattccttcgctaataaagaataataataattcagcaatctaatggcccctaacacacctttccttcccctcccctacagaagccaggaaagttgaactctctccttccggaaacacgataccctcgatttccaggacatctctagctcctgctttccccccctcctctccagctgctccatcttctcggtcctttcctcctcctcttcttcctcctcctcctccccctgagtagtaagtgctaacgacccgcaggactctcatcaggcctctattactaagtaaggggctgccttacccccaacccgccacccaggacaaggcgcacattctcggctgtctgcgaacctcggactctgagacatctccagcctgagactgcaaagtgggtgaagaactgcgagaactccccacatacagacagtacttccccggtggccacgaggacgccaagccggagatgaggctgggaagggggacgacggggccgcctagagcgaccaagactagggaactagggacatcctggccccctcctctagccccgcccggggcaaggggtgtcctgcgcgccgccccctctcggacccggagaggacgtcccagctagcgtacggggcccacacacagaggcagcagcgcggaggcggcagcggcgcggacagcgtgggaaagagggacactcacccgcttcagccccgagccttcactgcaccggaagtagtcacccgcccgttgccagggtgaggaagcggggctgacatcaagtctccccattggtcattcggggtaccacgtggtcggaagcagcctcccacaagcggctctgactccgccctccgcttcggagcggctcacctggcctcagaggtgcagcgctaactccacctggggcttcgttctgagctgcgcatgcgctattgcttatctctacccaccccgcccctgaataagcccgcaggatgtgattatatctgagtggttgattgactaatactgtgatgagaaatgaaattaaactgaccatcattttatctaggtgtcgcttaagagttactttctttcaatccttagagcactgttagacggtagggaaaactaaggttcagcctgcattgcttgtaggagttggggcacgagccttgcccagggggaaggagtgtaggcggtcttttatcggctaggatgtaagaccgaaacccagtcatgggttttgatgacccatgactgatggattttccttatacttccaccaaaacatcacgtcgaactgaatgtaaaggcagaaatgagaatctaactggcttctttaagccagctatagaggaatttacactaatgcaaaagataacacttttcttaccacatttttttgtttttggaaaatatttattcttcattaaaatgtcttaattatattaacacataatggtttattattgttattttaaataactttttaacatttcagttttttgttggtttttttcttttttttttggagatggagtttcactctgtcaaccaggctggagtgcaatggcacgatctcggctcactgcaacctctgcctcccgggctcaagcgattctcctgcctcagactcctgagtagctgggattacaggcgctcgatacacacccgactaattttttgtatttttagtagagacgggttttcaccatgtttgccatgctggtctcgaactcctgacctcaggtgatcctactgccttggcctcccaaagttctgggattactggcgtgagccaccgcacccagccacatttcagctttgtattcaatttttaatatagtaaatattaatagatgtaacccacagaaacaaaagctttggagtgttctctactattttggggagtataaaggtatgctgaaaccaaaaagttcgagaaccactgataccattattataaatataacctatgtggttttattatgtaacttggggctttttttctttctcttctaccactgacttcttagggaggggcaaggggaagaagtttattacatagtaagaataacagtttattacatagcaatagtaactgaaaccgattttgttacctagaagtaggatggatattataacaaaacataacataataacatcataaaagtaaaacgtgtggcactggctttggaactaggtgaagcagcaagagcaggaagggatccaaagtattaacaagagtctaaaaggacttgaggaagctgccaatgagggcttaaagggagctaaggaagatgttattggaagctggagaaaatggggcccttgttatatagtgccagaaagtttggcccaggcattaggaagcagacataaaccatccccattgtgacctttctgaattcctcacccgcagaatccatcagcataataaaatagttgttcttttgcacctttaaagtggatttttacacagcaatattaactggaaccagcaggaataaaagaaagatgttaaagttttaaaaagacatagacatgctcccttccatttcttaggcaacattcttcctggaatttaactacattgtaataatcatctcccagtgctgctctgtatacttttgtcttgggtatcacacccagatgccacacaggccatcctctggtaggtgaatactgctcaagtaaaagtaacaaaattcttcggacccttttttttattattattattgaggcagagtctcactctgttgcccaggctagaatgcagtggtgcgatctcagctcactgcaacctctgcctccccggttcaagtgattctcctgcctcagcctccccagtggctgggattacaggtgcccgtgaccacgcccggctaatttttgtctttttagtaaagatggggttttgtcatgctggccaggctggtctcgagctcctgaccttaggtgatccacccatctcggcctcccaaagtgctgggattacaggcatgaaccaccatgcccagcccagacccaagttttaacatttttaacctgcattgggtacagtaacaatgagatcctttgaaatattaataacgaacagttgtaatatctatttgattaactcaacatgttaaatttgaaaggaaagtctatactagtaaatctccttcagaaaaaatctggttgcctccctcttcctgttcccacctctcccaaacccggaaaagcagcaagctgaggaattacttcctttatctcaaataatcatgtctgctgcatcttgatctttgtactctaagtaagccccctctgtcctggttccctgggggtctccctttgttttgtattcctggaaaactattgctttaacacatgtgtcagaaatgtagcagaacaatagtgatagttttcaattgttgtgccgcaagttaacaccaattcacctgcttaagacaacacaaatgtaatatttccgtttctgtggatcaggtgtccaggtctctgctcagatctcagaaggctgaaatcaaggtgtcagtcagagctgccatctcatcggatgcccagagcgattctccaagctcattcaggtgattggcagaattcaaatccttgcagctgtagagctggccacttttgtcttcttcaaggtcaggaggagcagtcctctctgacttttccaccttgaaaggactcaactgattaggtcaggtcccccaggataatctctcctttgatgaacacagagtcaatgattcgtcgtcaagtttcaggagggatggccatcatattctcagcttccatccacactccaggggagaggatcatacagggtctgtgcaccaggggtagaaatcttgcaggtcatcttagaattttgcctaccacgtggaaaaaagaaagtttcaattatagatggactgcgacaacccttcaagcagtcctatggtagacaacagttgtttcgcctgcccagcatgaattccttcttatttctcctaacagcaccccacttcacttccagggactgcccttcaccacttgcacccagcgtaagtgggactgtccatcaggatgctccgtgggatgatcaactgacccatgctaagctaaagctgcttcttgcctggaatttgaaaattgacagcaataatgcaaagagtaaaagcagttgtttattcaaccaaggttacagagttccctgttactgctccagagcttgtatttttccaaaacctgcttccttagtttttctttcaattatcttaggtactccctatccttccaacaaattccttttatcttctttaatatataaaattttgagcaagacaaataatccagagattacttgactcccatgtcaagccctgatgacaacacattgtcttcggagccctgacgaagactggtaagatgaaaggtggcccacctgccatctctggtttcatccttgttgtctgtcaattatctggccagctatgttgtcatcccccattcatagggcaatataaatattcttcctgcacaacaaactgtctgaccagtttgtgatttaacacctttctctgcaatctcttagcttttttattgtaacatgtaaagagtgtccccccattctcataagcttgttataaacatgaaatacaatttgctgaaccagaaccagtgtcagcttctcaatcactttttcctaaccaccttattttaaattgcaatcacactaccctgcctgttctccttcctgttttatctctatcagtagcacacaccccaactaatcctctacaattttccccattcttttagtttattaatcatctctcctgtaaagtcagttccataaagatggggctatctttatttattttttattttttatttttttgagacagtgtcttgttgtagcacccaggctggagtgtagcgatgctaccatggctcactgcagcctcaaactcctgggatcaagccatcctcctgcctaagtctcccaagtagctgggactacagatgtgagcaactgcacccagctagaacagagatttaaaaagaaaaaaaaacattttattgatgttaaacataaatacagaaaagtacagcttgatgattcttcatatagtaaacacagtgtgtaaccattcctcagatcaagtgaaaaaaatcatgacctcgccccagggtaatcctgacatctaacatcacacatccattttctctatatttaaacattatatgaatggaattttacagtatgaaaactcttttatgtgtattaatgtcacacgttgagattagtccacgttggatgtttattctccttgccatgtggtatttcactgagataatttatccattacattgtgttttctttccaacttttaggttcagaggtacatgtacaggtttgttacatgggtaaattgtgtgctgcaggagtttggtgtacagattattttgtcacccaggtaataagcatagtacctgataggtagttttttgatcctcaccctcctcccactatgtaccttcaagtaggtccgggtgtctattgttccctgcattgtgtccatgtgtactcagtgattagctcccacttacaaatgacaaaatgtgatatttggttttctcctcctgcgttagtttgcttaggataatggcctccagcttcatccatgttgctgtaaaggacatgatctcattctcttttatggctgcttagtattccatagtgtatcagtaccacattttctttatccagtccatcgttgatgggcatctaggttgactgcatgtctttgccattgtgaatagtgctgcaatgaacatatgcatgtgtgtctttatggtagaacaatttatattcctttaggcatataccagtaatgggattgctgggttaaatggtatttctgttttaagttctttgagaaatctccagactgccttccacagtggctgaactaatttacattcccaccagcagggtataggcattcccttttccccacaacctcgtcagcatcgattgtcttttgactttttagtaatagccattctgactggtatgacgtgatgtctcattgcggttttgatttgcattcctctaatgattaatgatgttgagcattttttcataagcttgttggatacatttgtcttcttttgagaagtgtttgctcatgtcctttacccagtttttaatggaatttttttgttttggcttgttaatttgtttaatttccttacagattctggattagacctacgtcagatgcatagtttgcaaatattttctcccattctgtaggttgtcagtttactctgttgatagtttattttgctgtgcagaggctctttagcttaattaggtcccacttgtctatttttgttttctttgcaattgcttttgaagtcttcatcataaaatctttgccaaagcctatgtccaaaatcatattttctaggtttttctctagggtttttataattttgggttttacatttaagtctttaatccatcttgagttgatttttgtatatggtaaaatgaaggggtccagtttcaatcttctgcatatggctaaacagttatcccagcaccatttattgaatagtgagtcatttcttcattgcttgtttttgacagctttgttgaagttcagatagttgcaggtgtgaggcattatttctggactctctattctgtttcattggtctatgtgtctgttttgtaccagtaccatgctgttttgattactgtaggcttgtagtatactttcaagtcaggtagtgtcatgccttcagctttgttctttttgcttaggattgcttccactatttgggttattttggagtcccatatgaattttagagtggtttttttctaattccatgaaaaatgtaatggtagtttgatagaagtagcattagcattaaatctataaattgccttgggcagtatggccattttaacaatattgatccttcctatccataagcatggaatgttttgtttgtgttgtctctgatttctttcagctgtgttttgtaattctcactgtagaggtctttcacctccctagttaagtgtattcctaggtatttcattcttttgtggctattgtaaatgggattgcattctgcatttgactctcagcttggacattattgatatgtagaaatactactaatttttgtatgttgattttatatccttaaactttgctggccatggttcacacctgtaatcccagcactttgggaggccaaggcgggtggatcacttgaggtcaggagttcaagaccagcctgaccaaaatggtgaagccccatctctactaaaaaaaatacaaaattagtcaggcatggtggtgcatgcctgtaatcccagctacttggaaggctgaggcaggagaattgcttgaaccagggaggtggaggttgcagtgagccaagatcgcaccattgcactccagcctggacaagaacaaaactctctctaaaaaaaaaaaaaagaaaacaaaacaacagcaacaaaaactttgctgaagtgttttatcatgtcatatctagaagctcttgggtcaagactatgtggctttctaagtacagaatcatatcatccgcaaagagagatagtgtgacttcctctctttctatttggatgtcctttatttctttctcttgccttgttgttctggctaggacttctagtataatactatgttgaatagcagtagtgagagtgggcatctttgtcttgttctggttctcaaggggaatgcttctagcttttatccattcagtatgatgttggctatgggtttgtcatagatggctcttattattatcattattattattattattattttgagatggagtctcgccctgttgcccaggctggagtgcagtgcgatattggctcactgcaacccccacctcctcggttcaagcgattctcctgcctcagcctcccgagtagctgggattacaggagcacaccaccacgcccagctaatttttgtattttagtagagatggggtttcaccatcttggccaggctggtctcaaactcctgacctcaaatgatcctcctgccttggcctcccaaagttctgggattacaggcgtgagccaccacgcccggccaagaccaccttttgatgggcagagtagcacgtgcctatagggagggaaggaattgatggtggcattctgggagacaaattgccacactcagtaagggttcagtggtggcatgcccccaacatcccttttggttactaaagcaagaaaaaaattgaatttattaaaaggatgggagtagctcacaaaatcaaaaagaagactctcagaaaagataggaactagagaagttctagctagcaagcactaatggacatgttttcgaggtgcagccacaggataaatcaactttatgtgtttctcatacttttgtcttcctgctcaaattccaagctaaaaaaattttgtcacataattgaatcagtgtttccaccttatccaagagaggacaagatccttgaactcatactccctctaaaactgcataaaatgggagaaggaaatcaataaactattcccaaggtaagaaacatggatgccaggctgcagaacaacggatgctcattgtccaggatgctttgggtataactttacctaagataagaggaccagcaagggtttctccaactccatacatatcctttaaaaaaaaaatctgggccgggcctggtggctcacgcctgtaatcccagcactttgggaagccaaggcaggtgggtcacgaggtcaggagatcgagaccaccctggctaacatggatgcctctattaaaaatagaggctaaccctgtctctattaaacatacaaaaaattagttgggcacggtggcacgcacctgtagtcctagctactcgggaggctgaggcagaagaatcacttcaacccgggaggtggaggttgcagtgagccgagatcgcaccactgcattccagcctgggtgacagagcaagaagactgtgtcaaaaaaaaaaaaagaaaagaaaagaaaaactgcctctatgctatgttatctatgtctgtgaattcaataaagtttcaccaaacttaaaaatatattatttgtttggaattattaatcattgttattttatatagtttagaactaacaacatttctccatcctttatgatcttggtgaagaagagtgtacctgatagtacttggggaaaaaatgtatttagcttctatttcaatgtttctcttaagtgtgaggataacactgaagggatgtaatttgtatactaaactaactttttttttaatgtattttatttttagagatgggggtctcactatattgcccagggtggtcttaaactcctgggctccagtgatactgccaccttggcctcccacactgctgaaattacaggcatgagccaccacactcggccctaaactaacttttgaaaaacattttattatgaattttttttttgagacagagtctcactctgtctctcaggttggagtgcagtggcatgatctcggctcaccgcaaccttcgtctcccgggttcaagcaattctgcctcagccacctgagtagctgggattacaggcatgtgccaccacacctggctaatttttgtatttttagtagagatggggttttgccatgttagccattctggtctcgaactcctgacctcaggtgatctgcccacctcggcctcccaaagtgctggaattacaggcatgagccactgcacccggcccattatggaaaatttttaaaatctgttaaaataagacaacaatggggcaggtgcagtggctcacgcctgtaatcccagcagtttgggaggctgatgtgggtggatcacctgaggtcaggagttcgagaccagcctggccaacctggtgaaaccccatctctgctaaaaatacaaaaattagctgggcctggtggttggtgcctgtaatcccagctacttgggaggctgaggcaggagaatcactcgaacccaggaggcggagggtgcagtgagccaagatcacgccattgcactccagcctggacatcaagagcgaaactccgtctcaaaaaaaataaataaataaataagacaacaacgaagtttacagcattgattcactctcctttccttttgaatgaaatcccatgttccagtcaccaattagtctgtagtttatctgagtttattctggctgctcacactttgttagcagatgctgctggtgcccagattgcagctacttggctacctctagtctcagccctggcaagcagctccagcctgcaccatcagcttccctgtccttctgctttctgtcccagagccagctccaatgcccaagcataacttggggacacatggaagtgagcacccaccaaggggggtgttcaccctcaaccaaaggggatttaaatgctccagccttaagcccttcaggccaattctgagaggcaaactgtaaacttctcggagttcttgggatactgagtcttgcagcaaaggatgaagtgtcctgacattggcttttccttcctttctgccttacgcttcatagcctctcactttgctgtctgcaatcacctgccaaaaaactccctgcacctacactcctgtctaggggtttgtattcacgggaacccagatttagacaggctcctttatccagtcatatcttttggttactggcaacgtctaatattgatttatatgaagctcattttgcagacataactcaagatgttttttcaagatgttggctgatgtaattaactgctgtagagaacagcattatgtaggagcagcattattttgctcttcctcttttttgagacagagtcttgctctgttgcctaggctggagtgcagtagcacaatctcagctcactgcaacctccgcctcccaggttctagtgatcctcctccctcagcctcccaagtagccgggactatcagcgtgcaccaccatgcccagataatatttgtaattttagtagagctggggtttcgccatgttggccaggctggtctcaaactcctgacctcagctgatccgccctccttggcctcccaatattttacctttctacagaaattgagtagcactctcttcaatattcttgcttagttaaaagggagggagggaggaaggaaggaaagaagaaaggaaagtggagagggaaatgaataagctcttctttctgacagtttttactacaaaatttaagtgtgcttttggagctgaacataaaaaacttcactcacccaatttgagttccgagctttacctctaaatcttgtactagagccatctaagctatgggtgtattagcacccagttaggatgtgttagcaagtgaattggctgtcagcactttgagacctgggaacacacccaggcccccagggaagccggacccagaggtcagaggacagcactattgtagcccagtgtctctaatgggaaacagatgctcccagctgtcgcctgccatcagccagctcactgaatgttttcagccctggctccttctggaccaatcgagctgtataaacacattttatccgcaagcctggttgtgggggcagccaacctatctgtcttcttttctattaggagagcctgcctgtgctgaatccaaggtttaactcattagaataacaattaaacaaaggtaggatttttttttcccttttttttgtaaagcttctattttctttttgctaacagggttgatattagctgatggttaatctattgaaagtcaggggcaaaggaaatctgtttgaaatgagaatctttttttattttttgatggagtctcactctgtcgcccaggctggagtgcagtggcacgatctcagctcactgcaacctctgcctctcaggttcaagcaatcatcttgcctcagcctccatagtagctgggattacaggcacatgccaccatgactagctgatttttgtattttcggtagaaacaggatttcaccatgttggccaggctggtcttgaattcctgacctcaagtgatctgtctgcctccaaaagtgctaggattacaggtgtgagccaccgctcctggcctgatatgagattgctttaaagagaaatgcagacgtggtatgggagatcgggatgcctgacttgtagaagtaatcacatgtccttaggagtatcacttagcctctttgggcttcattttcctttttcagtaaaacgaaggcattagacttaactgatcactaaagaactttctcattattaacattttaaataatttgtcattttatggcttctatacattctttcatttaacatattttctgagcatctgttatgtacacagcagtcttactggcacttgtaaaacattaacaatagattccttagagagcctaggccataaggcatctgtttccttgtctctctccagcagctcttcccttttgttcccaataacaacagtcacttggaccatggtaacttatctgcatctccattttatgtggctttgctgggtctgccagtcacggtgacattgcagcccagcccaggtatgagcatgtgatccgggccttgctaataacataccatgccctgggccatgtaagtctgggctcatgacttatgccagtccaatccaagttcttccctgaaattttcaacaatcatttttggagagaagatgctcttttacatgtagggttactaaataggagagagtggccattccctttttcttttgcatggagaaagttcgtctaaagttgaaaaaaactgaggccaacacatgaagagaagcagagccagagatggggagaaatttcaaatggccttgtttgaagccccttcccgcccagctatgttcactaatctctcactccctcttcctctctttatctctctctctcttagacagttttgatctcaaacttttggcctcaagcgatcctctcatcccggcctctcaaagtgctgtgattacaggtgtcagccaccgtgcccaccgcacctggccactctcagatagtttgagatggctttctgtcactttcaacgaaaagactcctgacaaatacatagtcaaacccccattttttttagtataaggaaactgattctcacagtgtttggaattttttcaagcttccatggtgagtgagtagcagaggcggtacacaatcatagatctcctgacttccaaaccagttctttcattttcatgtttcttccacctttgtatgatgaacattttcgaacatgctgaaaatctgaaaataaagaaaagcaggccgagtgtggtggctcacgcctgtaatcccagcactttgggaggctgaggtgggtggatcccctgaggtcaggagttcaagaccagcctggccaacatggtgaaacccagtctctacgaaaaatacaaaattagccaggcgtggtggtgggtgcctgtagtcccagctacttgggaggctgaggcaggaggatcacttgaacctgggagggataggttgcagtaaaccgagattgcaccactgtaatccagcctaggcgacagagcaagactctgtctcaaaaataataataataataattgcaaaaacgtggcatatttaacaaccagtcactgctttttttaggtgagttgaatccttacatatgttatcaaaccgaaatggggtctgcttgcctggcacggtaaggccaaacatctacattgaggtttgcagtgggagaaaggagggtgtttatttgcagggcaccaagcaaggagaatctaggcagctcgtgcttaagacccaatctcctcgatggtttgtaagtaagggtttttaaaggcagaggtaaatttcaggaaagcagaagttacaggcaaaatcataaatcaatacatggaggttgcatattggtttggcatataaagggcaggatatcttgaagtgggagcttctaggtcataggtagattagaaaattttctgatttgcaattgataaggaagagaagcatcgtttaaaaatttggagtcagcaggccagcgcagtggctcatgcctgtaatcccagcactttggaaggctgaggtgggtggatcacctgaggtcgggagttcgagaccagcctgaccaacccctctctactaaaaatacaaaattagccaggcctggtggcgggtgcctgtaatcccagctactcggaaggctggggcaggagaatgtcttgaacccgagagatggaggttgcggtgagcccagatcacaccattgcactccagcctaggcaacaaaagcaaaactccatctcaaaaaaaaaaaaaaagaatttttggagtcagcagaaaaagaatgccagccctggcttgtggatgtgaccttctccaggtacctcaggaataaatttagaacaaaaaacagcagtcagagttcagctctcagttctcccttttctgaggtctttgggtcagtgggtccatttgatgggggatctggatttctgaaaaacaattcagggacataagttgttacctttaggccgggtgtggtggctcttgcctgtaatcccagcactttgggaggctgagctgggcggatcacctgaggtcaggagtttgtgaccagcctggccaacatggtggaaccccatctctactaaaaatacaagaaattagtttgacgtggtggcacgcgcctgtagtcccagctactcgggaggctgaggcaggagaagatgttacctttaatttatataggaaaccaaataccctgtgattctaccctccttggctattgttttaagctactgttacttcttgcttatctattttcctatttacttctcagggctagccaggtgcctggaattttccttgaaggaacttaagattttcctttctttccatgcttgagagggatcccacagactcctaggagggggttctgctccatttgtacctctcttggccaagtgatatctcagtaatcctgccagtcactctctagacaaacagctctaagagtagtttggagacacagaagccgcgtaagcctacagaaaaaagctggtcagtcctaaactgaaacaggctgggctttcacaaattttgcttgtccaaaaaacaggctcaaattacatcccaaacaactcacggctttttatagggctcttttaacactttagccaaataattgttagtttattttgtgtaaatggtttaaatatatgttttagcattaaaatgatccaaaaccaacacttggcattgctttcaagtgccttttcaaccttccctcagtggaaaccagattaacttcaaattttataagagaaatgtcctaatcttcccattctgccctcagtggttccaaaatcatgagaaaatgggcatcttcagtttcttctattttctgtaacttttcattaattattgagatatttattcagaaatgaaccagggaacatatgcttcaaattttatttttatggttttttttcactatgccatgaataatgtccaaaacatcaatattaaaccaaattaaaccataactgacaagggcacatttgaatctaataggtggtcaactgcattttttctgatccaattctacaaatgtagtagaatttgtactagaaaaatccaaaatattcttagaaacaacaaaatggaaatttttaaaaggagaaattctatataacatggtcatttaaagccagatttaccactggaaaaatttcctgggagcaaagccatatttattaaagacaaatgtacctcaagtacaggaatatctttctttcaggattctcaaaatgtaaatgtttacacatacaaatagtgacacattgtactttacagcaatatttctacaactgtggagctggaagaaactgtgataaactctgtggatccccttgggtgccttttaccatttctgtgccctgcccttagcttctatgtttttgctttgaacagccagagtctgtgactcttcaaagccatcccttggcctgttggagccactctgcccactttgcggagagctacaagtgactaggagttcacatccacccaggatggccttcggccaacaaatgactggtggtgacatatagatgcccagcccccttccctcaagagggtacaaactctggggtgtaatttagactctagagcatccctatgggatgaagcagagactggggctctgtctgaaatttctcgcttgcttagcttctttctattccttgtcctatctccttcattaccttatctgttccccccaaaagtccttccttaacatattgcttgcacacaactcctcatctcaaggtctgcttccaaagaaccccatgtaagacctgagatgaagtttacctgctccaatcctttcatttcaccaatgcttagcccaatctgtctgtcaagaacatgtaccatgttctgggcatggtttaggcatggagaagtgccaatctctaggaaagtggaaatgacagtcttttgacccaggcttacattatcttctgtcagggccagtttgagagttcaagggaatgtgttaccagtcacaagtacgtgaattacctcatgcattcagcattcattcaggcattatctactaacaacactcatggaagctgggaaacagagaaacctaataaagattaattggaaaattatgtaaatcatctactccaacctgaagtaggccagtagaaaaatatccaaagatttacctgagtccaacatcattcactcagaaactattaaacattattatttgattctcaatatcactttcttcttttttctattattatctctaaggtttacaaatataaaacatgaccggaaattgctggtagaaagtggttttatttttggccccaagagattctaaacactcatatgggaggtttccagtaaaagcacctctattcccactttactttttttttttttttttttgagatacactctgtcacccaagctggagtgcagtggtgtgatcttggctcactgcaacctctgcctcctgggtacaagtgattcttgtgcctcagcctcctgagtagctgggactacaggcatgcgccaacacaactggctaatttttgtattattagtagaggtggggtttcaccatgttagccaggctggtctcaaacacctgacctcaagtgatccacccaccttggcctcccaaagtgctgggattacaggcgtgagccaccgcgcctggcctcccactctactttttaatcatttatccaataaatatttacagggtatgagctttgactgctgcctaccttctaatcagccatgttatattttttgcacagtcccagctggtcctctttttcctagaacttattactaaacaaacaaacaaacaaacaaaaacaaataaacaaaaaacaaaataaataagtaatggttacaattcagatactatctgtagtaggcagcataataatccccctgaaatacctatgtcctaatccacagaatctgtgagcatgtaatttcacatggcaaaaggacattgaagttgcagatggaattaaggttaccaatcagatgaccttaaatagagagattatcctagattacctagatgggtgcaatgcaatcagaagagtccttaaatgtggaagagggaatcaggagtatcagtgtcggagtaatgggatgtgagcaaggcttaagtggccactgctaactttgaaaatgggagaggaccatgagccaaggagtgaagacagcctctagaagttggaaaagaaaatggattctcccttagagcctccagaaaggaacacagccctgccaacaccttggttttagcccagtaatactaattgtatataatggaattggaaaataataaatttgtgcgtgggtttttttgtcttgttttgtttttttgagacggagtcttgctctgtcacccaggctggagtgcaatggcatgatctcggctcactgtaacctccgcctcccaggttcaagcgattctcccacctcagcctcccgagtagctgagattacaagcgcctgccaccatgccagctaatttctgtatctttagtagagatgaggttttaccacattggccaggctggtcttgaactcctgacctcaaatgatctgtccgcctcggcctcccaaagtgctggggttacgggcctgagccactacacctggccaaatttgcgttattttaagccactaattttgtgataatttgttacagcaacaataggaaattgatatgccatctgctttccagattcattgctgcatctgaagaaactacgaaacctttgcctgtgtcacaggcataattcatatgtcaatcactcaattttgacttccctacctgtctttgaaatgccctgctattctttctggctgtcactagtgtcttctatatttgagctctattgcaatcacgggtcaagtgccattgctttcttctggcctcagtacaaaactaacaccaacaataataaatattttccagcttagaagtggtaattccccttgcaatttatactttgtggtatccagcttccttttctgcttcccgttccatttttacagtctgtttcatttgagactttggagataatgatgttcagtgatgatagcaataaaaaatgaaatacagatgggtttatgacaagaggaaatttgccaacttctctggacaacatatattaagaccaaagacacagagtgatggcatcagtatcaccaaggccccaaataattccatatatgcattacttataccctaatttattcctttattcattcgattgaacatttacaagtatcgattgagtgctgaccctgtgccaaaaactgctctagttacgattatgaggattcacccatgacaaagatctctgcccttgtgaaatttatattctgctgtggggaagtaggcaataaactagatagacaaataataaaataggttgatgatgtgaagtgcaatgagataaaagagcaggataagcaggattaagtaggggtgctgccatttacatcaggtggacaaggtaagcctcactttaaaaagtgtatttgaggctgagcatggtggctcatgcctgtaatcccagcactttgggaggccgaggcaggtggatcacctgaggtcaggagttcgaaaccgggctggccaacacggcgaaaccccgtctctaaaaaaatacaaaaatcagcctggcgtggtggcacatgtctgtaatcccagctactccagaggctgaggcagaagaatcgcttgaacccaggaggtggagactgcagtgagccaagatctcgccactgcactccagcctgggtgacagagcaagaccctatgtaaaaaaaaaaaaaaaaaagtgaacaaataaaagtaaaaagtgacatttgagaaaatacttgaagaaattgagagaatcatttcagacagaggagcaaccagttcaatggctgtgagtgaagggcaagcctggagggttggagaagtagcaaggtcagtagctagagcaggagcaagggggagagagttaggcaacgaagtagaaaagcaattgaggggaagactctgactttgaatccagatgaaaaatagggagtagccaggcacggtggctcacacctgtaatcctagcactttgggaggctgaggcaggtggatcatctgaggtcaggagtttgagaccagcctgggcaacatggggaaaccccatctctactaaaaatacacaacattagctgggcatggtggcgggcatctgtaatcccaactactcagggagctgtggctgaagacttgcttgaagccgggaggcggaggttgcagtgagctgaaatcccgccactgcactccaacctggtgacaaagcaagactctgcctcaaaaaaaaaaaaaaaaaaaaaaatgaaaagaaaaatagggagccattatatgtgacatgacctcattacgttttaaatcgattgtctggccaggagtggtgactcatgcctgtaatcccagcactttgggagtccaaggcaggtggatcacctgaggtcaagagtttcagacaagcctggccaacatggtgaaactctgtctctattaaagatacaaaaaaaaaaaaaaaatagccagacatggtggtgcacacctgtaatcccagctactcaggaggctgaggcaggagaattgcttgaacctgggggggtggaggttgcagtgagccaagatttgtgccactgcactctagtctgggtagcagagcaagactctgcctctaaataaataaataaacagattatcctagttgctaagaatctactgtagagaagcaatagagagagcggggcaccatgcattaagcaatttcagtaatctagctgagagatgatggctggagctagggggcagcaggggtgggaagagatcagattctggttatattttgaaggtagagccaagatgatttcctgttagactggacatgaactatgtcagaaagaaaaggataaaagatgactccaagctctttagcttagcaactaggatggcgtgttcagtcattgaaatatggaaaacaatacggagaagattatttatggagtagggggagatcaggtcaagttgggacatgttaattccgatacatctaacagatatccgagtggagatatcaaccaggcagtggaatatatgagcctagaattcaggagacatttctggattggaaatatattttttagaatcacaaacatatagtttatatttaaagtcatgagaataaaattgagatcacctaagggaatgggtgcagatacagagaagtggccaaaatctcagtaagaggtcaaggagatgggaagaatctacagagaaggttgaaaaagatgagtcaggcagggtgcggtggctcacgcttgtaatcccagcactttgggaggctgaggtgggtggatcacttgaggtcaaaagtttgagaccagcctagccaacagggcaaaaccccatctctactgaaaatacagaaattagctgagcatggtggcacacgcctgtagtcccagctacttgtgaggctgaggcaggagaacggcttgagcccaggaagtggaggttgcaatgagccaagatcacaccactgcactccagcctgggcaacagagagaatctcagtctcaaaaaaaagaaaagaaaaagaggatgtaggaggaaaaccagtagagtgtgaagacctgaaacccaagtgaggaagtgctcccaggaagagaaagtgatcaactaagaagcagactgaggtttgtccgcattgaggatttagtggcattggagtcattggttaaccttgattggagcactttcttggagttctgatggcaatgcctaatttgagaaaaggagactagggggaaaaacatagacagatcttttgaggaattttgtttagccacactaaagagaagcaaagattgaagctatagcaagagaagtgaagtcaagagagtgtttcttttacaataagaaaattaatagcacgaataaatgtgctgacaggaatgatcaaaaggagagggagaaattgatattggtgcagagggaagaactgttgaagctatgtttttgaacaggctgtaggagatggtacagagcagtggttcctaagcttcagggtgagtcggaatgccctagagggcctgcaaacacacagattgcagggcccccacccctagagtttctcattcagtccatctggagtggaacctgagaacttgcatttctttctttctttttttttttttttttgaaacagtcacccgggctggagtgcagtggcacgatctcagctcactgcaacctccacttaccaggttcaagcaattctcctgtctcagcctcccaagtagctgggattacaggtgcacatcaccacacctggctaatttttgtatttttagtagagacaaggtttcaccatattggtcaggctggtctcaaactcctgacctcaggtaatccacccacctcggcctcccaaatgccgggattacaggcatgaaccaccccacccagctgaacttgcatttctagtaagttcccagataatgctgacgctactggtttagggaacatatttaggaacacattaggaacctatatttaccaatatagggaaggaggttgttggctttattttattttattttattttattttgagacagtcttgctgtgtccgccaggctggagtgcagtggtgtgatctcggctcactgcaacctccacctcccaggttcaagcgattctcctgcctcagcctcccaagtagctgggactacaggtgcgcacctgtagtggctaattttttgtatttttagtacagatggggtttcaccgtgttagccaggatggtcttgatctcctgacctcgtgatccatctgcctcagcctcctaaagtgctgggattacaggcgtgagccaccacacccagctggtcgttggctttaaataggagtctgggctgggcatggtggctcatgcctgtaatcccagcatgaatgaatgaatcctcaccctttggaaggctgaggtgggtggatcacttgaggccaggagttcaaaaccagcctggtcaacatagcaaaaccccatctctattaaaaatacaaaaaattagctgggtgtggtgacacatgcctgtattcctagctactcgagaggctgaggcatgaaaatcgattgaaccctggaggaggaggttgcagtgagccgagatcactccaccgcactccaacctgggcgacagagtaagactctgtctcagaagaaatgaaaataaaagtaaataggagtctgttaatttgtaataacagattcatccattaaagtagttatacatgagggtttactttggaaagatgcagtcgggaagacaaagacagctaacatagccagtctgtgtctcaggatatgtgattcaccgagagcctagcagtgcttctgacgagaagtcactcaggatagctctaagtttccaggcacattaccctcaccttctactagctgggccatttttctgatgtacagccaagtagaaactctcggatcacagaagtactccctttacatgaatagaacgcctcagcagcctctcctggctgaagctcagcagcattcttggagtcccaggtgctctttgcaatgcgtgttccataacatcgcaaaagagcctaactcaacatgattgtgttattttgctcgccagcatttggagtcgtgatgagctgagggctgagccaaaaaccccaagaagcctgagcctgcattttttttgttgttgctcttactgcaatgttcatctcttgccagaaacagccactagcaatcaatctttccgtaaagtttttcttttctcccccatcgttgaggagataggggatagcaatacattctgaatattcagaatgtaatagcaacaacaacttccctctgtgtagctgtttaaagttttaaaacattttcccggccgggcgcagtggctcacgcctgtaattccagcactttgggaggccaaggtgggtggatcacctgagatcaggagttcaagatcagcctggctaacatggtgaaatcccacctctactaaaaatacaaaaattagccaggcatggtagcacatgcctgtaatcccagctactcaggaggctgaggcaggagaattgcttgaacacaggaggcagaggttgcagtgagccgagatcatggcattgcactccagcctggacaacaagagcgaaactccatctcaaaaaaacaaaacaaacaaacaaacaaaaaacattttccccttcaatttattgcatccactttgtacatgaggaaactggggctcagagagggaaaggaaattcaactggtggaaccaggactcctgatctttggatgccaaggttcaaatcttttccaaattccaaattcattttgtcatatgctggtctgaacagctcttccaagcccctctgacttggcacatggcagaaacaacaatggcgaatggcatgaactcacccattgcccctctttggaataccttgcataccttatctgtgttagcttttgccccttgtctctgcaccctgattaataatggtttgttgattgattgagctggttttctatatgccatacatttgaggaggtaaataggtgggcatggtttttatgcctttattttttttaagtagactttattttgtagaaaaactttaggtttacagaaaattgaaagttacaaattgatcagaaagtagagttcccacataccccttctccctctgcacagggtagtctctattatttacatcttatgtctatgtggtacaagtggtgaaccaacattgatacctattattattactattattattattattgagacggagtcttgctctgtcccccaggctggagtgcagtggcatgaatctcagctcactgcaacctccgcctcccaggttcaagagattctcgtgcctcagcctcccgagtaactgggattacaggcatgcacaactgcgcccggctagtttttgtatttttagtagagatggggcttcaccatgttgggcaagctggtctcaaactcctgacctcaagttatctgcctgccttgacctcccaaagtgctggaattacaggagtgagccaccgcgcccggccaatacctattattaactaaaatctacaatttacatcaggattcactctttgtgttataattctatggcttttgacatgtataatttataatgacatgtatccaccattacagtatctgagtatttttcactgatctaaacatcttctgtgcttcatctgtttgtcactccctcttgtcccctaccccccacccccaaggtcctagcaaccattgatctttttactgtttccataattttgtatttttcagaatgctatatagttagaatcataccgtatgcaggcttttctgttcagattggcttctttcacatagtaatatgcatatgttttctctatgtcttttcatggcttgataactagattgctagagtgcagtggcatgatctcggctcactgcacctccacctcctggattcaagcgattctcctgcctcagccacgagagtatctgggatcataggcgtgctccaccacaccaggctaatttttgtatttttagtagagatggggtttcaccatgttgcccatgctggtgtcaagctcccgagctcaagcgatctgcctacctcagcctcccaaagtgctgagattacactcgttagccactgcacctggcttcatttctttttattgctgaatactattccattgtatgtatgtgccacaatttttttatccatttgcctattgaaggacatcttggttgcttccaagtttaggcaattattaataaaatttctgttaataactgtgtgcaggtttttgtgtggatatagtttgcatctaatttgagtagacaaagaagagtgtgattgctggatcatagggtcagattatgtttaattttgtaagaaactgccagcaaagaaggagaattccttttactccacatccttgtcgcaattattgtgtcagtgttttgaattttagcgattctaataggcatatagtggtattttattttattttgttttgttttgttttttgaaacagagtctcactctgtcgcccaggctggagtgcaatggcacaatcttggctcactgcaacctctgcctcctgagttcaagcaattctcatgcctcagcctcccgagtagctgggactacaggcacatgccacctcatccagctaattttttgtaattttagtagagacggggtttggccgtgttgcccaggctggtctggaactcctggcctcaagcaatccgtctgcctcaggctcccaaagtgctaggattacaggtatgagccaccgcgcccagactattttatttttatttattattattattaatattattctttttgagacagtgtgccactgtgttgcccaggctggaatgcagtggtgaaatcttggctcactgcagcctgacatcccaggctcaagcgatcctcccacctcagcctccaaagtagctgggactacaggtgcacaccatcacacccagctccgtttatatttttgatgtttatttcactaactctcaagtcctacaaatcatcaactgttctctcccataatatcttttcagggccggtttttattttggctaagctgagtttagttcataagatatggattagtaattttcacccttcataataagaaagtttatcaattctgaaataatctagttagagtagaaagagtcttattcacaaaagacactattattacctccaatttgccagagaaagactccagacttcttctttcttccttttcttttctctcttgtttctttttgggtttgttgttatggatcctctagcgtcagcctcccaagtagctgggactgcagacacacgccactgtgcccggctaaatttttaaaattttttgtagatacagggactccctatattgcccaggctggtcttgaactcctggcttcaagccctcctcccaccttgacccatcaaagtgttggacttacaggcatgagccattgtgcttggtatcttgtttctctcctctctctctctctctctctctctctctctctctctctggaactatagtctctaggcaaaaaaaaaaaatgaaggcataccagatttcttatgttaaaagatcttgtcccttctagaaagatatgctaatgtagatctaaagaagaaagatttttccaaaatgatggatttaattaacactatttctttctttcttttttttttttttaagacagagttttgctcttgttgcccaggctggagcgcaatggcatgatctcggctcactgcaacctctgcctctcaggttcaagtgattctcctgcctcagcctcccaagtagctgggattacaggcaccagccagcacgcccggctaatttttgtatttttagtagagatggggtttcaccatgttggccaggctggtcttgaacacctaacttcagatgatccaccagcctcggcctcccaaagtgctgggattacaggtgtgaggcactgcacccggccaacactctttcttgatgtaagttggtatcatttcatagaaatgatgaatcattttcagggagaaaaaaaagctctcttagctctagagatttttagaaccttcaaaataaatgtaaaaggcttctatgttcatttcagatgagctgtttgtaccagtcagggctcttgattgcaaacaacagaaatggattgtgtttaactgaactggaaaagaaattagttggctgctcacagaattgatgatatggctggaaaatgggccacaaccaatgaaggctagacttgcaaaattgtaataaaaatcttaccccaggaagagtctggttatgctgtcattcccactggatacttcttgctaccaccaaataaatgaattctaactgtcccctcatgtctgtatcatttgttccagattcaaggttttgggagaagacagcacctgattggttgaatcagatcacatgactgatattgctattgggaaggggaagggtctgagaggacttcctcccaccaaaatttgcgcaatggtaaattttagaggtaaaactaaaaaacgtgttcattactgggaatataaagacaagaggccagctattgttgaaataatgctgtataacaagctaaatacataaacagatttcagtggcttgtaatgacacttattttcctcaatcataggtcttcaggctggctggggaagttctgcttcaggttgtgagttggctgggcttggctccagatggaagatccggtttacgactgctccaaatgtctttcattctagaaagagcagctactaagggcacacttatgaagatggcaaaagcacgagaggccacgccaaaccacacaagcacacttacaacctctgctcatatatctgatgacattccgttgtttaaagtgaattacatggccaagttcaaagacaaatgagataaggtatacattctgtctattctactggttactgtggattcaattgctcttatttttgtagtttcctaaagtggaagcttggatgactgatttaagatccttcttttcaaatatattcatttaatgatataaatttccctccaagtactgccttcactgcgtcctgaaaacttttataagttgtatttttggccaagcgtggtggctcatgcgtgtaatcctagcactttgggaggccgaggcgggcggatcacctgaggtcaggagttcgagaccagcctgatcaacatggataaaccccatctatactaaaaatacaaaaattagctggacgtggtggcaggtgcctgtaatcccagatactcgggaggctgaggcaggagaatcgcttgaacccaggaggcggaggttgcagtgagctgagattgtgccactgcactccagcctgggtgactccatctcaaaagaaaaaaaaaagttgtattttaatttagttcaaaatattttaaaatttctcttgaggattcctctttgacctaaaagtgtgttattaaatcttcaagtgttcttttattttccttcgttttttttcttttttctttttctttctttttttttcttttttgagacagagtcttgttctgttgcccagggtggagtgcagtggcatgatctcagctcactgcaacctctgcctcccaggttcaagagattctcctgcctcagcctcccgagtagctgagactacaggtgcatgccaccatgcctgactaatttttgtatttttagtagagacggtgtttcaccatgttggccaggctggtctcaaactcctgacctcaagtgatccactcacctcggcctcccaaagtgctgggattacaggcgtcagccaccgtgcctgaactttcctgtgttttttcaagtgttttttatatttttatgtttctgtgtttttttttaatttctgttttaatttcattgtagtttgagaataaacattgcataatttatttttttttacattttttaatgtaagttttatggcccagaatgtggtttatcttggtgaatgctccatttgaacctgtaaaaaaatatgtaatctacaattgttggataaattaacctatagaggtcaactatatccagttcattgatggtgctgttcagttcaactaagtccttattgattttctgcctgttgaatctgtttatttatgatggagggatgttggagcctccaactgtaatagtggattcatctatttccttgctgttctatcagtttttgcctcacatattttgatgctctgttattaggttcatacacattaaggactggtttgtcttcttggtgtattcaccttttatcattgtgtagtacccctctttatctttgataactttccttgctctgaaatctgctctgtctgaaattaatatagttattcccacttttttttttttttagatggagtcttgctctgtcgccaggctggagtgcagtggcatgatcttgactcaccgcaacctccgccttccgggttcaagtgattttcctgcctcggcctcccaagtagctgggactacagacgtccagccaccatgcccagctaatttttgtaattttagtagagcaaggtttcaccatgttggcctccatctcttgaccgtgtgatccacccacctcggcctcccaaagtgctgggattacaggtgtgagccactgcatctggcctattcccattttttatgattaatgctagcatagcatatctttttccatctctttacttttaatctatatgtgtctttatattctaaatgggtttcttgtggacaacatatacaggtgttcctcaacttatgatgaggttatgtcttgataaacccagaatagtttatcgtaagtcaaaaatgcatttaatacatccaacctacaaaatctcatagcttagcctaccttaaaaattagcctacagttgagcaaaataatctaatacaaagcctattttataataatgtgtggaatatctcatgtaatttattgaagactgtactgaaagcaaaagatagagtggtttatacaggaatttgaagtacagtttctactgagtgcatatcactttcacatcatcgtaaagtcaaaaaattgtaagttgaaccatcataaattggggactatctgtagttgtgtcttgttttttgatccataatggtcttttttttttttttttttttttttgagatggtgtctcactctgttgtccaggcttgggtgcaatggcatgatctcggctcactgcaacctctgcctcccgggttcaagcgattctcctgcctcagcctcccaagtagctgggattacagacatgcaccaccatgcctgggtaatttttttgtattttaagtagagatggaggtttcactatgttggccaggttggcctttaactcctgacctcaggtgatctgcctgccttggcctcccgaagtgctgggaacataggcgtgagtcaccgcgcccagcttaaacagcttattttagtatttcttgcaaggctgagctattagcaacaagttctctcaatttttgtttttctaagacactctatttctccttcacttttgaaggataatttcagagtacagaattttaggttggtgtttcttttctcagcagttttaatgttttattctactcttctggtttgtatggtttcttagacgtcagatgtaattcttatctttgcttctttgtgggtaaaatgtgttttttcctctggcatctttcaagatttttcctgtatatttgattttctaaagtttgaatatgatattcctaggtataggggttttcttggtttttgttttctttttctttcttttttttgggggggggatgggaggggcttttatcctgctaggtgttctctgagatccctcaatctgtggtttggtgtctggcgtaagtttaggaaaattctcagtgattattgcttcaaatattgtgtctattcctttttcttttttcttcttctggtattcccattacatgtatgttgcatcacttgtagtagccccacagttctcagatattctgttctgtgtttgtttgtttgtttgtttgtttgttttccagtcttttttctgtttgctttttagttttggaggtttctactcagatattctcaatgttacagattattacctcagccacgtccagtctactaatgagcccatcaaaggtattcttcatttctgttttagtgcttttgatatgtagaagttcttttcaagagtttggggtttcactcttgttgcccaagctggagtgcaatggaacaatctcttggctcactgcaacctctgtctcccgggttcaagcgattctcctgcctcagcctcctgagtagctaggattacaggcatgtgccaccacatccagctaattttttgtgtttttagtggaaatggggtttcaccatgttagccaggctggtctcgaacccctgacctcaggtgatccacctgcctcagcctcccaaagtgctggaattacaggcatgagccacctcgcctggcctagaagttttttttattctttcttagaattttcatctttctgcttacattatccatctgttcttgtatgttgtctactttttccattagagcccttagcatattcatcagtgttttaacaattcccagtctgataattctaaaattctgccatatcagattctggttctgatattcagtctcttcaaactgtgtttttgttttttagtatgtcttgtaattttttgttgaaaggtaaatatgatgcactggttaagaagaactgcaataaatggaactttactaatgtgatgagttgttgggggaggggaagctctatatcctttgattaggtctcagtcttgtggtgagcctgtgccccagactgtgaacttcaacagtgcttctcaggacccctccccccttaggtgggacaggatggctggagctagctgaagctgggtatttcccctgtctcaggtagattaggctctgatgaagccccagaaggttgaactctaataaaatcatttattttgagagcaggcctgtttagaaagaacagaattctctggtgtattttaaaatggtttctattctcctccacctgccagaagcacaaggggttttttctctaagattcacaccttgtagagactcagtagataaaactcacaaaaccatgggtcccccgccccctcacaaaactgtgagtcccccaccctgttaaactccgggggaccctggaatctcagagttgtccacactgagcctccagcaattcatcaattacagttcagattttcccatcctagtactggtgccagctaagttttctgcccctgtaaattgtgattctccgtatctgcctatctatctcctcagttctgggggcagctgcttgccctgtgacctcacttttctgatatatctatgaagagttattgatttttcattctgttcagctttttacttgctgttgggacagagtggtgacttctaagatcctaacatgtcagaccttaaagcagaagttcctgcctatattttgctgagaggcattggaaagttacttggcaaaaaattctattttaaacagtgaagaatcagaaacaataatccaatcagccccaggtcctccagggtataaaagaaggaccaatgggtggaaacaggttggaaatcagcattggctcacaggagaatgatcaaatgataatgattttttgtggttataccaaactctggatgggacctgaagctggagttggaggatctacaaagcctcaagggaaggaagacttttaatgcttattgtctgctgtctctttccttccttccttctttcctttcttccttctcctcctcttcctccttcttctttcttcttttcttttctttcttttcccaacatcttattccttagaatcatacaaaatgaaactctacagatgggatcaaagaaggctgaagatgacaaagaaaaaagggagataacaaaaggaatagaagaggaaattttagggaatttgttgttagaaggtagaaaaaggtaatcagaaatgatcctatggaagataggatgcctcacttctgattaagaaattcaaggttttatggacagaactttaacccttctcccccagtgtcctgagagtgacatcccctccaccccaggcaatggctctttctggggcaggaaattctccaaacaagtttccaaattaagggttttgattgagctcacttcccagaattttgttctggcctctttttccgattacagaatatgaatcagctaatgattctgaaaaataaaacttcggatacttctttgtacttggagaaagaaagaaatatactgtgcagtgctcttttgatacattccagaataatcttcatattaactcaatggggaagcaattggatttcctctgaaagagaggagaacatatctcccacattgcaaaaaaaaaaaaaacctgtcaataaattccaggaacaggagctactacaaatgttcccattttttgaagagaatttgttctgacctcacttctaagggacttggtgtatgtgtcttgagcttattttccatttgctaattaaaagtaccttgtcagcagtatttattactattattattggtgaatgaatcatcctctttttccaccaaatctactttccagactcacccattctaaatgctggcttacaactcactcatggctgccaaaacaacccactcagatgagtctcctcagcgtttctctgccaaatccttttcctctctaatctgagactaaaagtcttatttgaaaaattgcctgctcttaaaaaattttctggattgacatatgtcttactcccataacaaaacattttttgcattcttccaagaccaagtcagatctccttaataaggcatgaaaaatatagatttgccttcagcttagtgtcttccagggcagacctgtgaattctgagtcttgctaatgaatggattgccagagaagtcttagagacccacattctctctgtatttgtaagatatcatagcagtggaaattctaatcaatgcattaaaaaagggccgctctaaccctgtactttatttttcaattgaatttccaactctcaaaaaatcacaaaaatagtaccaagatgctcgtacagccttcaccaagctcccccaaagttaacaacttatgtaactagttaatcagttaccaaaatcagaaaattaacattaattgattcattactattacctaagtgataaactttattccaatttcactagttgtcctgctaatctcccttttctggtcccagatcccattgagtatcacgtgttgcattcagttgttatgtctctttagacgctttaatttagggctattactcaatccttcatttttcatgaccttggcacttctaaaagtcagttatttcgggccagttattttgtagactatctttcagtttgagatatctcttcttagaaaatgacctctcacacacctctgaccagatttctggaagggtattgaggttctacacttgtgagaaaatgtatgctcaggggaaaaatagtgaaattatgccaaataaatacttatttcttctatagtttaggaacatactgaaaaatgaggcctcatgccactgatcttttgaggcctatatgagtctgaaatgtagttatccttttcaaagcaatcaagtagtgtgcaatcaattacaaaaaaaaaaacccagaaaaatgaactcaaatggcttaagccacaaagaagatttattggcatacataactgagaaatctggcggtaagttgaacttcaggcaaatgttgacccaggtccccctaagtctttcaaccttaactttacctgccacagtgttggcttcacctcagggatggctttctatatggtcacaaggtggttatcaataaaactggggtaacatgccctctcatccacatccagaacatcataacccagtcactagggcccccagatgaaatgcagtaattgccttaaaccacctgctctcctgagccaagaatagaaccactgtcacccaaatcacatatggggtgctgttaggaagcgaaaaggagaaatggatgctatattgatatggtttggctgtgtccccacgcaaatctcatcttgaattcccacatgttgtgagagagacccagtgagaggtaattaaatcatgggggtgagtctttcccatgttgctctcatgatagtgaataagtctcatgacatctaatggttttgttttttttttttattttttgagatggagtctcgctctgtcacccaggctggagttcagtggtgcgatctcggctcactgcaagctctgcctcctgggttcacatcattctcctgcctcagcctcccgagtagctgggactacaggcacccgccaccacgcccggctaattttttgtatttttagtagagatgggctttcaccatgttagccaggatggtctcaatctcctgaccttgtgatctgcccaccccggcctcccaaagtgctgggattacaggtgtgagccaccgtgcccggctgagatctaatggttttaaaaaagggagtttccctgcacaagctctctcctcttgtctgctgccatgtgagatatgcctttcaccttccaccatgattgtgaggcctccccagccatgtggaactataagtccattaaacctttctcttttgtaaattgcccagtctccggtatgtctttatcagcagcatgaaaatggactaatacatatgtagacaattaactatgtccccacaggctagaatccttagtggtggaattgcagagaagtgtatatatggggcaggagattctgtgcccatgtgttccaatggatgctcaatgctaagatggactcagcaggaaggtcagaaagaacacagtctggaagaaattaggcatgaaaactgggagaaggtggtctgtattgctttagtataacactgtctttggtgggcatttagacctatgcacccacaagtgtgttctgtgcaacatggaataatgataggccccatttgaaatatgggtcctcaagcagacaagtttgagaaatgttacctcccatcaaacatacctgtgcctcaggccacatctcctcagcccatagttttactccagccattgctgtggcaactagccatggacctcatctcagccatactatgctcctcctgttttctgcctcagggcttctttgtcactgcaggctgggatgccttcaggagtctgttgagtgcttctaatgcatgtacaatcctggacacgtgaaagaggtaacatctaaggggaaagctttgataaatgtgggatggagccaatgaaaacaatttctcatctgggtgcagtcggtggctcatgcctgtaaccccagcactttgggggccaaggcaggcaaatcacctgaggtcaggcatttgagaccagcctgaccaacatggcggaaccccatctctactaaaaatacaaaacattagccaggtgtgtggtggtgggcacctgtaatcccagctactcaggaggctgaggcaggagaattgcttgaacctgggaggtggaggttgcagtgagcaaagaccgcaccactgcactccagcctgggcgacaagagcaaaattccatctcggaaaaaaaaaaaaagaaaaagaaaagaaaggaagacagagagagaaagacagaaggaaggaaggagaaagaaagaaagaaagaaagaaagaaagaaagaaagaaagaaagaaagaaagaaagaaagaaagaaagaaagagaaagaaagaaggaaggaaggaaggaaggaaggaaggaaggaaggaaggaaggaaggaaggaaggaaggaaggaaagaaagaaagagaaagaaagaaagaaagaaaaaaagagaaagagaaaggaagaaagagacagagagagagaaaggaaggaaggaaggaaggaaggaaaagaaagaaaatttctctcaggtagaaattctgaggtgccttctacacagctcctccatggagcactatccatgtagagccctacagtggttattgactcaatagcacacccttggattggcttattttttctttctcttttctgctgttcctgctcctcaggatcactttaaaaacaaaacatccgggcacagtggctcatgcctgtaattccagcactttgggaggccgaggtgggcagatcacctgaggtcaggagttcaagaccagcctggtccaacttggtgaagccctgtctctactaaaaatacaataattagctgggcgtggtggcacacgcctgtaatcccagctactagggaggctgaggcaggacaattgcttgaacctgggaggtggagattgcagtgagccaagattgtgccactggactacagcctaggcaacagaataagactctgtctttaaataaataaataaatatagggccaggcatggtggctcacacctgtaatcccagcactttgagacatcaaggcacatggatcacttgagtccaggaatttgagaccagcctgggcaacatggtgaaaccctgtctctaccaaaatacaaaaattagcctggtgtggtggtgcacgcctatagtcttagctacttgtgaggctgaggtgggaggatcacttgagcccaggcggcagagattgcagcaaaatgagatcttgctactgcactccagcctgggtgacagtcagaccctatctcaaaaaaacaaaaacaaaaaccagatcaggccatatctgtaatcccagcactttaggaggccaaagtgggagaacttgagcacaggagtttgagaccagcctgggcaacatagtaagacactatctaaagaattaaagaatgagctgggtgtggtggcatgttcctgcagtcccagctacttgggggtgtgggctgaggtgggaggatctcttgagccagggaggtcgaggctgcagtgagctgtgattgtgccactgcactgcagcgtgggtggcagagcgagaccctgtctccaaacaaaactactttcacacaaacccttatctcgggctgtgctttctagaataacctagattaagactccagatgaaacaattagttattctagtgcagacttctctaagtccctattgtttaatggacagcagtgatactctaaaattgtttatagtatatagtattctctaaatttattgacattgcaatactttttctttcatgaacattttgtgaggctagtgttctgcagacacattttgggcaagtttggcctagactgaacaccctgggtctcacatgatgtgattgtagcagctgtctccaagagtgacccctaatgagccattcctggtagccatggctaccattccccattctcacattaaatctaggctggcctgggacttgtgtcagccaatagaatgaacataaataacactgcaggcctggcctttaagacaactggcaattcccactgtctccttctgggaatactacctttgggagccttgagttaccatttaagaaatctggctactctgggccgggcacggtggctcacgcctgtaatcctagcactttgggaggctgaggcagttggatcacgaggttgggagtttgagaccagcctaaccaacttggagaaaccccatctctactaaaaatacaaaattaaccgggcgtggtggcacatgccagtaatcccagctactcaggaggctgaggcaggagaatcacttgaactcaggaggtggaggttgcggtgagccaatatcgtgccattgcactatagcctggataacaagagcgaaactccgtctcaaaaaaaaaaaaggaaaagaaagaaagaaatctggctcctagaggagaggccctgagacaacagggaaagagatgcagctgctcagcatcccaggctgaatttccagatggctccagtcttagccacatctcactgtaaaccaagccagaccagaggaactgcccagctaaggctactcaacatacagaaacataagtataataacaagtttattgttttaaaccactaagttttgtggtggtttgtaataaattgcaatagataacagaaacagtggtagaatagagcttggaactgtctgcttttgagctctcaatatggagtcctaaaacagggaattgggtacaaatgcttcagcctttgattttttgcttggatgctttcctgcttctcttagtgtcacctattaacctatttcgtggggttttctttctattaaaattttagtacaaaatcatgagtctccttcttagctactgcctaagggagatgaaatctgctttgagattcagatctttccacctatttttcatggtttctggcctcccagtgttccctccaaacttctggtagcagttctttgaggaatcaaccatttctgcttttagtgaatgtgcccagtccaccctggctcaattggggaattttgggcacacaggcctggccaatcagagcttccctttcccgagccacagtgattagagatggcaatgatccaagataaccaagctatatcagacttctgctttaacaactgaaaaataaacattttatcttccactggaattggggtatgaatagctaagcaacaaaacacatatagtcttcatatacattgagctgacacagcccacactgtagattaaagctagacttctcttaaaagccagaggtgtatattcagtggtttgcttgacatctccatttacatgtcaaataggtgctacaacttagtatgtccaaaaagcaactcttggtattcacacatcccaaatatgcttttccaatagtcttttcaatcccgtaaatggctcccccattgaccagaactatggagttatccttgattcttctctttatttcacagccaatccatcagaaaactgcttctgctttcccctcaaagaacatccaaatccaattatttttcattgcctccactatcctgttacaaaccttcattttttcttgcatagatttttccattagcacatatcatttatgtgtttatttatgccctctcctatcactagtatataagttctatgaatattcccaggaatgtaagaatgtaaattccgtggattttgttaatgcagctatgtgtttagtcactgttttaaacacaatgctttgttcactgtacctctggtgcctataacaatgattaacacatataagatgttcaataaagacttgttaattaaattaataaaaatacacagaagacagtggttagatcatagagacagacaaggtactaatgtcatagtttgagctccttgatccaactgaacctgaagacctatgctgggctttatgattgcatgagccaataagctctcattttttattaggccagttttgagttggatttctaggaaaaacttgcaactggaagaaccctgatacactaaatatccttaaacttatttctcaagcaacaaaatggtagaacttttactatcttctcagcctacctccatagatctgttaacatttgtgaggctcaaatgagtaactatatacggaagcacattgctgacttcaacataattctgccaatgtgtgagctgttgttactcacaactatgtaaataataagatcttatcattgaaaggaaaattagactaggaaactgaaatctttcaagttatcaaaaaaattactttggctgccaaagtgggactctaaacagccatgaaagcctgttcaggttttccagggatagaaaacagcatagctccactgaggagacttaaagggatgacagagaaccaggaatacagctgctttacaagttttaaaaaagaagaaggtaatggtggtagtgcgtgttttgcagagggctggtggtgggaggtgggggtggggggagacttaaagacaaccatgcccagatctcttccttttacagaagaggccttgaaattgtcagttccttgttcaagatcacagagccactttcagtggcaggtttgggaccagaaatccgagtctcctggcttccaatcccatactctttcctatataccacgaatatactgttttactcttttgatttttttctttgtttttccttcctctaaatttttggagatacattgtagctttggagataaaatttgaagtctcctccatttcaatatttgacctatggaacaatttgtagacagaggatggagagacgaagtcttattccagtattccaaagttttcttgcccaagaaaatctcaatagttcaagttgttggctgccatctatgcttcaaaggccctaaactctttcttccaaagtattttggctttaagatctttaaattgtgttggtcttttattaattcctaaaggcctttttataaacactgaacaataaataaaagaagaggggccggacacagtggctcacacctggaatcccagcactttgggaggccgaggcgggcggatcatgaggtcaggagatcgagaccatcctagctaacacggtgaaaccccgtctctactaaacatacaaaaaaaaaattagccgggcttggtggcgggcgcctgaagtcccagctactcgagaggctgaggcaggagaatggcgtgaacctgggaggcggagcttgcagtgagcccagatcgtgccactgcactccagcctgggcgacagagcgagactccgtctcaaaaaaaaaagaagaggaggacaatcaactttcaaggcaaaagagaaaaacatctacacaacagtgtgaaatgtggggagtacatcactgggggttgggggaagttgagtgaagagaggaggtcaggggaacgtgtgaagatctggggtccactcttcatggagctgtttccaggataagtatccacccttgggaatattataaaaggggtggcacaggctttgatgccccagcctctgccttctgtgacctttctatagccaccatcaccaccttgctctctatgttctcacttctggctcccaatctcttcattccttttgaaacagcaaagagattggccaagttggcagctgtatgcagatctgaagctcagaagagataccagagtcattcatgtattgaggatcactgcagctacagggagctatttcattcagggtcacccatttctgaagcagcccatatccaatgacttagatgctggagtacaaaagcccaacacctcagcgggactggggacaaccctgaaggcccattctggcttctgagcttctcatacactggctgagtctgtgatgagccctgcattgctgtctatccttgctcctttcccctcctctcctcaggcattgaattcaagcccactccccagtaaacatcttgcacactaaactccatctcagcatctgcttctcagataacccaacctagggaatgcgctccttcatctcactcttggtttttttttttttttttttttttttttttttgagacagagtctcattctgtcaccaggctggagtgcagtggcgcaatctcagctcactgcaacctccgcctcctgggttcaagcgattctcctgcttcagcctcctgaatagctgggactacaggtgtgcgccaccacgcccacctaatttttgtatttttagtagagacagggtttcaccatgttggccaggatggtctcgatctcttaatcttgtgatctgcctacctcggcctcccaaagtgctgggattacaggcgtgagccaccatgcccagcctcactcttgtttcatctacgctcctgggtttcctagttcctaatgtcctgatggcacctccacccactttccccagaactaacttgataacctgttctgttcagggttttccagaatctgccatgacagccattttgttggactcatcaccaggaaacacactccaattacctgctgaatcctactagcccaggttctatcttttggaccatgacatttgaaccttgagatggggcaagaaccagatcctctatctgagctggatgaacagaaagaatttatgttggtagcatactgaaatagccactgggtcccctggaatgaggtcatcacaatccaagacagaagatatggtgcagcacctgtgtgcacaggcattgcttgaaattctgtgactgaactttgaactgctgagtcattgctgaaataccagagagggcactgtatagttagcgaggtgcatggatgaaacttaggtggaaaagaagatatgtagtttttttttcaaaattgactgctttttgcacagatgcattcaagttttcaattttgtcataggttctctacttgtaaatagatatatgctcacattattttattattatttattttcttactaatgtttaattattttaaattaatttataatttgtccacagacaattcactttctctgttgagttttttatttttttttacagacagggtctcactctgttgtccaggctggaatgcagtggcacgatcatagctcactgcaacctcaaactgctggcctcaagagatcctcctgcctcagactcctaagtagcaaggtagcaaagtatgcactattatgcctggctaattctttgtatttttttgtagagacagggtctttttatgttgtctcgaacttctggcttcaagcaattgtcccaccttggcctcccaaaaagctgggattacaggaatgaatagttatatttatgtatttattattattattattattgagacggagtctcactctgtcaccaggctggagtgcagtggcacgatctcagcccactgcaacctccatctcccgggttcaagtgattcttctgcctcagcctcccaagtagctgggattacaggcatctgccaccacacccaactaattttgtatccttagtaaagacaggatttcatcatgttggccaggctggtctcaaactcttgacttcaggtgatccaccagcctcagcctcccaaagtgctgggattacaggcatgagccaccacgcccggctaaggagttatttttataaagtgtcctgtcgactacttctttggtttggttttcgggaagtagatatttgttgatttaatatatgaaagtattcagaagagagtggttagactatggtgctaatatcatggtttgaattcctgaatcccacctaacttgaagaactatgctatgatttgaatgcccccttcaagcatcatgttgaaatttaattgccggctgggtacggtggcttacacctgtaatcccagcactttgggaggccgaggtgggtggatcacctgaggtcaggagtttgcgatcagcctggccaacatggtgaaaccccgtctctactaacaatataaaaattagctgggcatggtggtgggtgcctgtaatcccagctacctgggaggctgaggaaggagaattgcttgaacctgggaggcagaggttgcagtgagctgagactgcgccattgcactccagtccgggcaacaagagcaaaacgctgtctcaaaaaaaaaaaaaaaaaaaaaggaaagaaagaaagaaagaaatttcattgccaacgcaatggtattgggaggtgaggcttttgtttttgtttttgaaacagagtctcgctctgttgcccaggctggagtgcaatggcatgtctcagctcactgcaacctccgcctcccgggttcaagcaattctcttgcctcggcctctggaggtgaactttttaagaggtaattgggttatgagggctccaccctcatgaatggactaatgtcattattgtgggagtgggttagttttcatgggagtgggctcctgataaaaggatagattcaacctgatttctctctgtctcattctcaccctcccttgcccttcagccttccaccatttatgtggccctcaccagatgctgtcaccataccttcggactttccagcctccaaaactgtaagtcaaataatcttctattgtgtctaaattacctggcttcaggcattctgttataacaacacaaaacagactaagacaacctatccctgagctttttagctacgtgtgccaatatgttctcttttgcttgtgccagattgagttggattttaaatgaaagaacttgcacgtgaccttgggaaaatcactaaatgtttctaaacttgtttctcaagcagcaaaatggtaaaactataaacccagcctacctcctatgtagcagatacaaacatattcccttgagcatttctaccacagtgtaggctcacctaaatttcagcaaccaacatccaaatctctttggctgaagagttcttggctacaccagattctacttcactctgctggcagtcagacaagctcctgagcagccctcaaataatgttacatcaatagcccagcttccttagccctcaggtgtgatcacttcaaagtggttgttctgtgctctctgcaagaacatcctagtaggattaagccctagttgcctacagtggtaacctgcctatcaacaaacacatcctttgttgcctgtcttctcttccctgacacactcccctactcctttattggtgcttcctggaatctcgttgtaaacagactactgtcactcagattcctatctcaggatctgcttttaagggagcaaaactaaagaaagttacaccttcccaatgcttggtaaacacaaatctctgtgtgatttgcctgtgatcaggacatggctgagttgtcactggtagaagtggtttaaactcaagtcatcaatgcacgtttacaagcatgaaagctgtgatggctagtctcatgatgaattaatattgttaagctcttcattttattccatacgcaattgtgtttattttaaaaataactcttcaatggattctgtagatcgacgaataaagcacctgtaaagataatcttgccttaaaacagctgaaagtatgtgcacctttatagaatcaattgcataaacagcactggtatgaataaagctggaatatatttgcacacaatgattgagagctccacagaacatgttgcgatggtggaaaagtattttcaatggcttagagaggctcctgcacatggaaggatgagaaatgagatgactcataaggagccaactctcaagtcttaaaaccaacttcatccgacaccagactttgtgtggcaaccacagccccaaaacaaagaggaaacaccatatgttcccagtgtgggaagactgctgggccccactggtcttatcggtgacacctgcactcccagctggggagaataactggtagtgtcatcttcaaaagcagaggacagcaaacacagcacaaagaagcaccagaaatgtgggctgaaggggttggtgggttgattagctggccatcgtattcagggagctggacgagagccatcatgtcctctgtttcccatgctggtggccacagctctcatcttggcaacaacccatcactggcaaggtggtttgagaacttcctctttcatcccatcttctcacccttcccccattctgctgctctgcccccaaaccacacatttagggttcacttgacaaggcagaggcttgttataatttcttatccattcatgctgctataacaaaatgcctgagactggataatttataaagaacagaaatttatttctcacaattctggaagctgggaagtccaagatcaaggcttggcatttggtctagtgaggatcttcatattgcatcctcacatggcagaaggctgaagggcaagctagccaagcactctgcgaagcctcttctgtaagggccttaatactatttatgaggaaggaactcccattgcctaattacctctgaaagcccccacctttaataccagcacattggtaacacctgaattttggaggtgacacattaagaccatagcatgatttatattttgcttgcccctccctctcaatttccaccattattcaaagaattaaagaacaccagaggtgcagcctcctcaaaactaaaataataatataaatatgtatataaatatacacacatacttgataggcatctctatatagaggtatatatatatatatacatagggatagagagaaagagagagagagaagaaagaagagagagagagaaggaaagagacacacagagagaaagagacagagagaaagagagagacagaaagaaagagagacggagagaaagagacagagagacaaagaaagaaagaagaagaaagagaccgagagaaagaaggaaagagacacagaggaagagaaagagaaacagagataaagaaagagacagagagaaagagagatggagagaaagaaggagagacagagagagaaagaaaaagagaaagaaaaagagagagaaagaaagagagaaagaaaaagagagacagaaaaggatggaaggaagaaaggaaggagaagaaagaaaaagaaagaaagagaaagaaagaaaagaaaagaaagagacacaaagagagagagaaagaaaaaagagaaggaaggaaggagatgtggtgaaattttaacagttggggaatatggatgaagggcatatggaagttttttagaccattcttgcaaccttaatgtaagtctgaaatgttatttcaaaattaaaaataaagaaactaattattagaacactggtataattatgtataattatgatcacagtatgatcatagtattttttaactattaaaaatctatttgtggttgggcatggtggcttatgcctgtaatctcagcacttttggatcacttgaggtcatttgaggagtttgagaccagcctggccaacatggtgaaaccctgtctctacaaaaaatacaaaacattagctgggcatgatggcacacgcctgtaatcccagctatttgggaggctgaggcaggagaatcacttgaacctggaagatggagtttgcagtgagccaagattgttccaccacactccagcctgtgcagcagagcgagactctgtctcaaaaaaaaaaaaaaaaagttttcctttccttttcatttttgtcaaggtgagatttacatgaaattaaccatttttaaagtgaataatttagtggcatgtaatactttcacaatgttgtataagcgccatttctacctaattccaaaacattttcatcatctcaaaaggaaaccccatgccaagtgttccagttatccccatcccctcttcacagcctttacacatctgttttctgtctctatgactttgcctattctggatatttcatataaatggaatcattcaatatttgtccttttgtgtctagcttatttcacttggcatgttttcaaggttcatccatgctatagcatgtatcagtacttcatttattcttacggctgaataatattcctttttttttttttttttggagatagagtctcgttctatccccagactggagtgcagtggctcgatctcagctcactgcaacctccgcctcccaggttcaagcgattctcctgcctcagcctcccgagaagctgggattacaggcacccaccatcacgcctggctaatttttgtatttttagtagagacgggtttcaccatgttggccaggctggtctcaaactcctgacctcagatgatccactcgcctcagcctcccagagtactgggattacagacataagccactgcgcccggccttttttttttttttttttttttttccttgaaacagagtcttgctttgacacccaggctggagtgcagtgatgcgatctcagctcactgcaacctccgcatcccgggttcaagtgattctcctgcctcagcctcccaagtagctgggattacaggcatgtgctaccacacccagctaatttttgtatttttagtagagatggcgttttgccatgttggccaggctggtctcgaactcctgacctcagttgatccatctgcctcggcctcccaaagtgctgggattataagcatgagccatcgcgcccggcccagataatgttccattttatggatataccacaattcatttatccattcatctgttgatgtatctatggctgtttccaccttctagctattgtgaatagtgctgccgtaaacatagaacacatgaaaacttggtgtttgttagtgtctatttatgacttaaaatataagtcccctctgaaaatctatgaataatatgacacttagacttctcagatgtgtaagttcctttttgtatttaagctagtttagattgggtttctgtcaacttgaaagaatcctgactaccacaaaatttttaaatatctctcaaaatgcagtcttttggatctacggaaaaagtttgctcattaacaataactttttgaaacaagaccaagtaaaattttctgaagttcaaagctctcctgtccgcaagcaaacttgaaatgaataagaatctgaaacatttctgaaatagaagaatgagctcagctaagcacagaacattcctgaacagtgtctgccactgcaacaggataatcataatacagggtcttgaaccagaagtgtttttgtgtgtgccagatttaaagaaattcacagtcctttaactgtgaaagaattctaattttaaaaaccaaacctttcctaaatcaacggtaatcattttttgcaaccatctgaacagaagttggaaaacacaaacactgttctttacttctttaccgtctgcttcctgccatccatccttcatctcttgtggtcataggaatttcagcattttcttttcgaaaggcttctaggaattgcctttggtttacttggtgaaatcttgcaccgcatacacttcttcaaaagcacattgtttcttcccatttttgttgaagaaaaaccaagtaatgagagaatgtatttgctgacaacctcaaaaaaattctatcaccttcagttcattttgatctggggattcttgactcacctggttaatcaggatccagtttaatctgaggtctagcctacttcccactatataactgctgtggtggatcagcagtggagtttgcatttccttctgcttctcaaatctcttcactctcttccttttccctccaggatactgtggattggagcaatcaaattcttgcttctagaaatgtgagattggtgcaacacattctaattcaatgtgatgttcacttaaactgaggtgaatttaggaactttccatcatttgggggaactatgtttggctatatggtcagtgaacatgtcttaaaagtaaaaggagaggggaaaggagaggaggggacaaagaagagagagacaggaagaggggcagaagagaaggggagagagagatgaagagaaaaagagagagagagaaataaggagagagggagaacaggaagagagaaagaaaaatactttttttggtttatgtcaggggtcccccacccctgggccatggaccggtaccagtccctggcctgttaggaaccaggccgcacagcaggaggtgagcaggggtgagtgagccttacaacctgagctctatctctgtcagatcagcggcagcattagcttctcataggagcgtgaaacctactgtgaactgtgcatgcaggggatctagtttgcacgctccttataagaatctaatgcctgatgatctgaggtgaaacggtttcatcctgaaactatgccccaagccctattcagtgaaagaaattgtcttccatgaaaccagttcctggtgccagaaagattggggaccgctggcttatatgactaaagagacagaggaatctcatttcaggtgaaacttgatcaattggatcaaacatatccccaaggacctgatgtttttgcatctcttcattatgctaaggtcaagatggttgccacaagccctcagagatatatgctagctttctattatctaggaggaaagagatgcagaattcccactgcagttccatgagtcaccctgattggactgacgaaggtcacatgcctgtctctgcatcaatcactatggccagtgggggtgggggatgggatggattatgatgactggatggatctaggtcacatgtttcatccctagagttagagctggagtcagcatcgccagatgcacacagattcccaaaaagaaacctagaactactggtaagagaagtgtatgctggaaagaaaatcaatgaatgtccatcatgttgatcttccagtttggccagatgattccatatctttataattcctccttttaatctatattagtttgagttggcttcttgtacttacagccaaagagtgttcactaagacctcacactagaatagtgaaaagagaaaaaacagcagtggcctaagtttcagggaagaggttgaacacagtgaagttacatcacatggacacttagctcatataagaggacaataacagtgtaaattacttgggtggctctgccccccatctgagatggcaggtgtgaatggctcttcccttaaccagcttggttctgtctttcctcccattgtatgagcatcttgccaactataacatgattctagtatacatttcataaaagagggccctacaccagctttaactggtactcaacaaaaggaacagaaatggctggagaaataactggccaagcagtacttattgaatatgttactctccaaagtggcatgtttctgaaaggctctaaagataattttcctaaaggactttcaaggaatatttttctaaaagacattttgtttttctttcttttttaaaatattcccacagcaatagaatttttttcttaaagaattttgagggaagtgttgctgatttataagattagactccaccacacctagaaagataattatcatccactgaagctaagaaaactgatcagtggaagaaatggaatatcactgtgtctatgaacataatcaatctgagggtttggccccatattggccaactattaaaatgggtctctgcacatcattaaaacttaataaatattgaaaaatgaatttggttgattctggccaaatggccatgcttgatgagataacctggacccagcatgcttaaattctgttttggggcatttcacagtgatttggtggacagagagaggtggtattacttttaataccatttctgctatgaattatttgtatgatctggggaaaattacataatttctccaagtttcaagtttccccactggtgaaatgagaataaaaatgcttaccctacttgttttccagagttattaaaaattggtggcctatactctcttaagcagctgcttgatgtcttctagggctgcatgaatgatatacagaaggaaaaatattcagatggaaaacaatgtcagtgcctccagagatattcagtgaacagtttatcccatctaatgtacccttggttgttaaaatataatcaagcacaacagtacaacccaacaggaagcatagtttctccatggcaccatagcaatcctaatggagatgatatttctactactgtgtgttgccaactcccagcttatgatctttgacccaaaaagctccagagaggaacaaattatgaaaaatagcctctgctgtccagaacaaagcctagtgctaagtcaaaaaagaaagaaacactgggagccagccacgcagatctaagctttccaagcagaggaagtaatttaatgggacctgcttccagggaatctggatgttgtgatgtacagtgaagcagaaagaggtttatgttgttccaggcaaagctcagttctgagattacagaaactgtctttttggtcaagttgctttatgatttaaaaataaaaaagacttctcttttctgcatacgcctaaatctaaatcctgccttcaggtagccatatgcctctttcaagagtccaataaggcttgggaagctactaataacaacttgtcctttgccctgtaaaggcattgctttcctcattttccgtcattccaagggatatatggatatacgtatatgtgtacctagtgacccagcaaatcctgtcttagtatgtacccagcagaaacggttgtctatgtccaccataggcatttcaaaagtgttcatagcagtactgtatgaaattgctccaaagtggaaacgggtaggaatttaactcttcagctttatttactattcttttagcatctgaataggaaagtagattagttggacggaacccactgaagttaactgaaaattcacttacatggaaacctttatctgttcctagaatgacttacacaattttcttgtgaagatgtagtgttttcaataaactcacatctcatgtcatgggcaaaattaccaggaaagttgttaagaactaataccatttgattgtctctgaaaatattgaatatgggctgagcttggtggctcatgcctgtaatcacagcactttgggaggccaaggctctccaccgggcgtggtggctcacacttgtaatcccagcattttgggaggcagaggcaggcagatcatgaggtcaggagctcgagaacagcctggccaacacagtgaaaccctgtctctactaaaaatacaaaattagctgggcatggtggcgggtgcctgtaatcccagctactcgggaggctgaggcaggagaatcgcctaacctgggagtcagaggttgcggtgggccgagattgcgccactgcactccagcctgggcgacagagctagactccgtctcaaaaacaaacaaacaaacgaacaaaaacaacaaaaaacagtgaatctctctctcactctctctctctttctctacacacacacacacacacacacaccacttattggttctgtttctctggagaaccctgacaaacacaagggatgtgggtgatgcaccatggtatccacgaaggttgatgttatgctttggatgtctgtcccctccaaatctcatgttgaaacatgataccaaagttcaaggtggggcttggtgggaggtgttagggtcatgggggtggatccctcatgaaaggcttggtttgctgtccttgcagtaatgaatgagttctcactctattagttcacctgagctagttgtttgaaagagcctggcacctctgcttctccctcttgccctgtctctcaccatgtgatgtgtggctctttgcctcccaccatgattggaagcttcttaagcccctaaccagatgcagatgctggcaccacacttcttgggtatagcttttgtatgtgcagtgacagcaaagacctcagctgaggcatctcggaaattgtcccaatttgaagcaaggcggagtggcctttgtacctcacaaccccctggtagggggaggatggcctgatcttggacttggaagctcccttcagcaggggggcagtgactggagagagactcagaaccataagccaaataaacctcttttctttgtaaattacccagcctcaggtgttcctttgtagcaacacttatggactaacacagttattgaggtaggaggaaagaacacacacaatgtgttatcttcttgcataacttttaaatatttacatgtacggcgtgtgggtctccacttgccctcttgccccatccagaggttgctggaaccagctcacagtggctctctggagctgattgtatccatttcttctcaactcccggtttggtgacatcaggttggtagctcggtaccactgcatgctgtgggtatttacaccaaggaaatcagcaaacactacaaatcagggctatttttcctccagggagctggctgcttaatgtttacctacacagtctgcctgggttccataaatggtagcagcaagcctgccccacacaccagcaattccacgaggaagtccctggtccatggcgccatctctcctgagctcccacgactccatttcttcccgcacaaccctttagctatagggaggtgacaggtccccactgccacttctctttgagttgttccccactcttccttgttcaattggtaggtagtccctccactacagcctctttctttgaactgtctgagatgaactctgtttcctgctgggccttgactggtaagaaaggcagatctgttccttattctgtgcttcagcctacaattcaacggccatcccctcccctcttccagcttctagcttcaggatcagcagccgacaagttgtttgatttttcaccttccctcctttctaccctgtccatttgtccttccttgccaaacatgcagaagaagaggcttagagtctctgctgtggcttcagtcctgctacaaatatcttttttttttttttttttgggagatggagttttcctatttgttgcccaggatggagtgcagtggcatgatctcagctcactgcaacctccgcttcccgggttcaagcaattctcctgcgtcagcctccctagtagctgggattacaggcatgcgccaccatgcccagctaattctacatttttaatagagacagggtttcaccatgttggtcaggctggtcttgaattcgtgacctcagatgatccacccgcctcggcctcccaaagtgctaggaatacaggcatgagccactgcgcccagccagtcctgctacaaactttcagtcacactccagaaaagacatcaccgcagcccattgttttgttcttctgttaccctggctacttaatatatgtggcagagttgcttattgaggttagttttggaagccccaaatatataaaagagagcggaaaggcaactgtcacaattaactggaaacaatacatttaatttgagaaatcaagagttacagcaatcacgtggggctgtggggctctgcttatctcatctccttcaattattttgcaaatctgaacctcttgtggtttcaacatgcaatcttatatccctgcatgtctgacttacactttcagtaatcactccgaataatgagcctggacttagaacaagggcagggactgctgcaggccctggcacaccatgcagaccattgacctgccttcttgccacacaatagctgtggagttcggtgtttttttcaagttgcctcatctttcccaagtccctctagtcacactgcctccctgagttggcagagacacggtgtggctttggtgaggttaatcaagaacaaaaaagaacatctctgtcttctttttcatttggttttgctaaccaccaatgctttttttgcttctcagaaaaaaaggaaagaaaagaaaaaaaagctgtggctatcaggttggtctgcttaatccttctgccttgccttctctttcttctggaaaaagacctgatttcccttcccacatctagtcagtgggcggtaaggacaaaggaagttgggtagttggaaccacctgacccaagctagaccaatcacagtttctgtcccatatgccacttgagttgagttgccaaatcagttgtttctgagacatctaggagtggcatcgttgggggaaggttttcaaggtacttctgacggagattcctcggggcacctgggtcctgtcatttggcagattgtttagcgtttaatttgaatgcatgagctgtgcatcattccaccagtaaatctcttatttacttgcaagccatgaaatgaggcccggaaatgagacccagctttgcccaaaggtgagacggagagagtcaacataatctgaagataggataaaacgaggagagcctctctctctctctcaaggcagtcaaagtggaaagacagaaggtctcagaacagccaatcacagctagtctttgcaaggccttccaggcacggcaatctgtcttctgagcctccaaatctcaccagccagattatggacaccaaggagctagcgaactctaccagtgacacgcttccaaaatactcatctctatgtatggtggaggccttggccattatgtagtctgtattactagcttctagatctaaaaggtaaatgaagtttccctttttcttattctgcaccattcaacaatactaacttaggaccttaaatgagttttgtcagcatttttacatttgaattcacataaagttatcttcaaaggaatgaccttgcgcccagtcaagggtaactccaataaaaaacttgccaaccttatgtgaaaatgaaatgagttgttggggaagggaaggcattgagaatattttctgaagtgtaatagtaataataaggttgaatatttcattcaatccttaatactgctctaggacctaggtactgttagtatcaccatattaaagttggaaaattaggtctaaaagagctaaatcactggttccaaatcacttattactagtgaatggcagagctgggattcaaaaccaggttgactgactccaaattctatacagttagccattatgctagttcctacatgccagtcactgtggggaccccattattcgtctcgcatcttaaagtgtattgctagcagggtcaaagtcatgtttttcaaacctttggatactgtactgcaatggcttggcactggggaacatatcccaatatctgcctaccatagcataatatagcccttctctgagtcacaagcaaagtcatctcaaaaggagggtaaatctgatgcgatagtggtagatatctcacaagtggatcatcataaaaagttcatataagcaatcgtaacaaataatacatcatttttaacattgagttctcagagaggagaacttcttccttgtagatatgcataaaaggccagcatgaggaaactgagcccagatggagaatgaggtttctgtatcagatagaatgggctaggttatgctgcagaaacaaatgacttccagtgtcaatggcttaaaacaaggtttatctttttacttatgctatgtgaacaatgtcagttgggtgttcatttggctaccttgggagtgaccttggaaaagagggagagaatgtagtgaggaagagcatgtagtgaattctatattggttcttagcatttctatgtggaagtgatgtactttcttctgcctgcacttatttcattgatcaaagaaagcacgtggccacaagtaactttcagtgcatgggaacattgacttccatatgccgaaaagatggaggagctgaaacagagcaaccacgactaatgactaccttgctggcttgtcaaagagacttgatcgtgttgagggtactcaagtactcacttcctttccctcgtgtgccttccctctgagagtgaagaaaacatactgaaatgccaaagactgcctgaaaaacttccacattgatgataaattgagggaaaaggacacttcagaacatatttggatctttccatcttgaaagggaaatttcttgtgaagttttaagtggccacgcttgattgtatcagacaatttaaaaatatttcattgatgataaaacatggcaagtgaagattatgatttcttgaattttcccttaaaggctgagaggagaaaagtccctgctaggtagcattgtccaacactccaagggagatgagaagggaaccctcagagaaaatgtatgggggtgggggtgatggaggaaagcataacctatggatgcccaagtgctatgaattaaggaagaaacctttatgactttcctatttctgtaatgttctaaaatgttccattgtcaatgttaacagtcaaggttagttcttgtccagggcagagaatatgataaaatgtcatcggcaatcactggaatgggattttcaccagatgagcagaggcaatcagtgtgaccacagcctggagttccatattgggcacttctttctagctggtcttggattctcattgcatttcatgtatctaatcccccaccctcccacacttccccaaaaaggaaaagagagaattaacaaaataaataaatactcatcagtcaccaaaaaaaaaaaaaaatccggcagtataaaaccagtgaatcatgatatagtttcttgttagcgcagcagacatctattggagcatttttcccaatctctctgttttagaaactattcagagaactgcttcctgattcccactgatcacagctaatggggtgagcagcagatataagctgggcctaaaatttgcccaatcacattgtctctccgcaaatttagtgcttagaatatttaaaaaatattttaatgttttaaaattttgaaaaaaatctcaaaatttcagaaaagtttcaagacagtacaaatatatttgattgttttttcttttctccttatttttctttttttcttctttcttttttttttttttttttttttgagacaaggtcttgctctgttgcccagactggagtacagtatagtggtgtgatcatgggtcactgcagcctccatctcctgggctcaagccatcctcctacctcagccttcttagtagttggaactataggggcaagcaaccatgcccaactaaaaaaacaattttattgtagaaacagggtctgactatgttgcccaggctggtctcaaattcctgggctcaagcggtcctcctatctcagcctcctaaaatgcacgcagccaaatatatctatttatttctaaaaatatgagagtaagctaccaacacaatgacccaacactcttggggagcttagtgttttttatttccttcagaaaaagacattctcctatacaatcaaaatgcagtctgcaaaatcaggaaatcaatacgaatacgtcactaccagttaatcctcaggcctcatttaagttctaccactgtcccaataatatcctttatagtaaaagggtccagttcacaatcattcattacatgtctcttcattagggcttagacaacttaaagaattttgaaagttagtcttacacagtaaaacaaagccatataaacagacattcagggaaaagtaagtcttccctcccgtgtgacgcccagaggcaatctctcttaccagtgtctcatgcatgcttctagaccattgaccatctaccatacacaagcacagttgtgtacattattgaatagggatgtccaagcctctcttagttcagggaaaaataaaatcaggtctaggagttcttcctttaagaatgttgaatatttattaagaactttattgttcaccattaagacaaaggttaaagagtttccaagtgaatatattcaccaaaatttgtaatacaaaagtcactattcacttggagaagataaaaattcttctattgtcatacatttgccattttacttctctctttataaacattaagaatcctttgtcatttagtcgtttcaaatgcttggaacatcttccagattattacctaagttataaaatagtagtgtgaaagttgtttttaaaattgtgttagttgatatataatattcacaagtaaacttactaagcagttgttaatgttgcattatgtatagtaatgtaagtttatttatataataatatgtttttatcttaatgacatcaatgtgaaaaattcaaactttattcctgaatcttaaatataaggcacaaaatctttatttatttatttatttttgagacaaggtcttgctgtcacccaggtggagtgcagtggtgcaaacatggctcactgcagccttgacctcctgggctcaagtgattctcccacctcagcctttcaagtagctgggaccacaggtgtgcaccaccatgcccagctaatttttaattttgtagagatggggccttgccatgttgcccaaggtggtctcaactgttgggctcaagcaatcctcctgtctcagcctcccaaagtgctgggattacagataagagccaccacatcccgctatttctttaataacatagaaaatggacctataacttaaaatgtgaaattctgatgtggtcatcttattccacttgcccagtgggctaaggagagagacgcattggcagcaatattagcaaatatgaatacgaatacaggaaacagagatgaggggaggtgcgtttctgaggacattctagtttcagctcccagtcccttcctgagcactgattgctttcttgcctttggattctatgctgcaagactctacagtatccttctaataaatacccatgctcatgtctttttaaattttgcttaagctagtttgagttggtttctgttatgtgcaacattcctaagaatatgattagggaagtggagggtcacttgagcccaaagaaatctgaagaaacacaattcccatatggttttgttgtttttctttttttgagatggagtctcactctgttgccgaggccggagtgcagtggcatgatctcggctcatggcaatctccacctcccaggttcaagcgattctcctgcctcatccccgccgagtagctgggattacaggcatgtgccaccaccatgcctggctaatctttgtatttttagtagagacggggtttcaccatgttggccaggctggtgtggagctcctgacctcaggtgatccgccctccttggcctcccaatgtgctgagattacaggcatgagccaccgtgcctggccccacatggtttctgatgctccgtgagctctccagaactgaaagattatgacagacctacaagtctaaattatggatccaaatggaggaaaatatgtaaatcaagtaattgttttccaagtttttgtttagttgaaaaatgagctgttgtcagagttaacctgttccatcttttagagttgttccacttctaattaaaatgtctttcctaactcttagtttaagtttaataatttttccaaaaaaattaaaaaatttaatccattttagtgaccatttcctgtcctgctcatcagatgaactttttgaagtatgattgagtacactatttcttactaattcaagagaaaagacactgctaattaatttcagattttagtaaaaagacatttcaaaaacgtaacactgccacattggggataaaatttcaacatgagttttggtggggacaaatcaaaccatagcactgctcaagacaaaaagcatgtgtagtgatgaaggataatgactcaattttaattttttaaaattcatgaaaacagctcataaccccaaggcaggaatttctcacaacttgccccaacacagtataattcgttagtttatttgctttggcactgtcagatagcatggagttttcatctccacattttggccaaatttgggtaatgtagaacccacacttaaggttgggcacagactctcactcacacattttcattttcctgtgcctgattctggtttgctcttggcaactactccttcataaactcttagaggaaggtgatcatgtgaacccagagatgctgaaaatagtttgtaactcttgtgccagtagtgcttatagaacaaagggtcccaattgccttctaaggggatttgtctcacttctcttgactcatgtccacatccagaaagctgggaaccttacagtattgagcattctattccaggaatgtcaagttgcaagcactctgactacaatgcaatataaagagtttctttaagaatatggagaaatgatctgcaatggtctcaaaataaggcaagataacccacaaagacgatagccaaaggccaccatatttgtcttagtattaggtaggatatagatagaacggcaagtaacagagacctgagaaaacaagggcttaaacgagataggatttaatttttctatcacatagaacttttggaaaaatccatggatgaaatggtgggcatgctctacaaaatcctctgtaatcttggcttcttctagcttaccatccattgttcctagttaatagagtgtggcttttgtcttaaggacctaagatggctgctaaaactctagcttttacatttgcattccaggcagtagagtaaaatgatggaagaaggaagaggcaaaattaactagtctgatgacttcaaaggaagatccctagaagctgtcatttgcctctataccaggatacaaagaagaatgagtaaaataatctttattatggaaagccctaaactcaactaacaggttctattactatggaagacagagagaacaaatatttgggaacaaccattgttgtcacttactatcacttcaagttccttggagagcatgcataacctttctggtggtctgacctgctcagtgatcctatgtactatggcccaactgctggtagagagctttctctgctgatccagggtgttctgtttgcaaagaataaagatttactcagataatctcaaataataggacatttactataatgtaatatactttataaaggtggggggtagatgttcatcaaatggccaatgaagcagatctcatttttccaatacgactacaaaacatttccagaaatccatttcagaactttgccactcccccattaaggggtgtatttcctcacctgggaagatttttttgattgctgtgactgatgaagtatgaatggcagaagtgatactctgtgtctactgaggcaaggtcataaaatgtaatagtttcagccgggtgcaatggctcacgcctgtaaccccagcactttgggaggccaaggcaggcagatcacctgaggtcaggagttcgagaccagcctggccaacatggtgaaactctgtatctactaaaaatacaaaaattagccaggccatggtggtgggtgcctgtaatcccagctacttggcaggttgaggcataagaattgcttgaactcgggaggcagaagttgcagtgagcagaggtcatgccattccactctagcctggacaacaagagtgaaactccgtctcaaaaaaaaaaagtaatagttttcatcactttggaactaagccactatactcccagctgacagccagcactaacttgtaacacatgtgaaggagccatcttggaagcaaatcctccagccttcaggatagccacctcagctgatgcaatgtggggaacaggtgagccttcccccatagccctttgcaaatcaaagattcttgagaaaatatattattgtggttgttttaagctgtgaagttttgggctataaaaatgagtaacaagaactgtcagaactcaaggaaacatccatgatcaggaagtacaatatagctgggccttaatgtgtactggaatatacattgaggaacaggagggtctttcaggatctaatatgggtcaggtgaccaggttatctttgcacacttggatatcagtcaagatccaattagtagacagaaacagtaacttgaacaaggtaagtttacataattattcattgtaacaggattagagtaacagagaattgacaacaaaggaataactggggtttgggaagagaactctaaagaatataggaatcatggatatagggaacatccactatacctagtactgagatagagcattcaaatgagaggcaaatctggaaaagcctcttcatccctgtgggctgaggtccgaacttcattggtgagggagcagctgtggcacatactggactgtgagaagttactggggtgccacactggcaggacttgatgggaatctggcttctggagagcaggagagaaaccttccacaggagttggacacagaaaaccaatagagaaaaatgaataaaaccaaaagctggttctctgaaaagatcaagaaaattaataaacctctatttagaatgacaaaaaacaaatggcaaagacaaaaattatcatatattataaattaaaaaagagatatcaccagacccttcagactttaaaatgataattaggaaatactaccaaaacacccgttaggtcgaagggaggagtgcctctgccaggccgcccatcgtctgggaagtgaggagcgcctctgcctggccattgtgcaaccctccaagtgtgaagtgacagccttgtgtgtgacctttctcccttccccaagtttgcattttcgacattaaagtttactttttaataattaaaaaaacaccgttatgcctataaattcaacgactcgaatgacatggactaatttcttggcatacacaaactatcaaaattcactcaagaagaatagataacctgaatagtcctatataactaaataaattgaatttttagttgaaaactttcctatgagaaaaactggtttcatttaaagatgcttttagtcaggtgcagtggctcatgcctgtaatttcagcactttagaaggccaaggcaggcagatcacttgaggccaggagttcgagaacaacctggccaacatggtgaaatcccatcactactaagaatacaaaaattagctgggcatggtggcagtgcctgtaatcccagctacttgggaggctgaggcaagagaatagcttgaacccgggaggtggaggttgcagtgagccaagatcgtgccactgtactccagcctgggtgacagaacaagactctgtctcaagaaaaaaaaaaaaagtgtttagctagctggctagatagttttattgacaaattctactaaacacttaaggaaaaaataacaccaattcaatacagtgttttccagaaaatacaaggggaaagactactgacttcattttatgaattagatttgccctgatatcaaaaccagacaaaaacattgcaagaaacctgttgaccagttaccttcatgaatactgtttcaaaaatccataacattatattatcaaattcaaataataatatattaaaaagacaatacatcacaacaaatgaagtttatcccaggaatacaaagctgactaaagatttcaaaatcaataaatataattcaccatattaacaggctaaagaagaaaaaccacacatgaaaacgacagatgctgaaaaagcatttgaaaaaaatgcagcattttttcatgattaaaaatttgcagaaaactaggcaaaggaagaaactttctttacctgattaagagcatctccaggtaatattatacttactggtgaaaaactgaatgaatgcttccttcctaaaatggggagcaagatcgcttcttggccttttggctaagatcaggtgaagacggggagcaagatattatctgctctcaccacctctattcagcattatactggaagttctagcagttgtactaaggcaggaaaaataaataaaaggtatggaaatacagaaggatgaaattaaaatgtctctcttcatagatgacatggttatctttggagaagaatctttagaaatctacagtaatctcctagaattaataaatgagtttagcaagcttgtgggatacaaggtcaatataccaaaattaattgtttttctatattctaataataaacaattagaaactgaaatttaaaagtatcacttacaatagtacagaaaatattgcaacacttaggtacaaattttaaaaaatatctgcagtatacaaaaaaccagaatacgctggtgaaagaaaccaaagactatagaagatatataccatgttcatggtttggaaagattcagtattattgagatgtcaattctccacaagttgatttatagattcaatgcccttctaaaataaaatgtcagcaggcttttttgtaggaatgaagaagctgatttttaaatggctttatatggaaaggcaaacaaactagaacagccaacacaattttgagaaagaacaaagttaaaagacttactataaagctatagtagtgaagatagtgtggtgttggaaagaggatagaaaaatagatgaataaaacagactggagaatctggaaatagacccaaacaaaaaaaggccaatttgtttttattttttatttttagtgacagggtctcactgtgtcacccagaatggagtgcaatggtgtgatagcttacctcaaactcatgggctcaagcaatctccctgctaagcttcctgagtagcccaccacaaccagctaatttcttaactattttaagagaataaactaggtattgatgaaatgtatctcaaaataataagagctatttatgacaaacccacagccaatatcatactgaatgggcaaaacctggaagcattccctttgaaaaccggcacaagacaaggatgccctctctcagcactcctattcaacatagcgttggaagttctggccagggcaatcaggcaggagaaagaaatgaagggtattcaattaggaaaagaggaagtcaaattgtctctgtttgcagatgacatgagtgtatattcagaaaaccccatcgtctcagcccaaaatctccttaagccaataagcaacttcagcaaagtctcaggatacaaaatcaatgtgcaaaaatcataagcattcctatacaccaataacagacaaacagagagccaaatcatgagtgaactcccattcacaattgcttcaaagagaataaaatacctaggaatccaacttacaagggatgtgaaggacctcttcaaggagaactacaaaccactgctcaatgaaataaaagaggacacaaacaaatagaagaacattccatgctcatggataggaagaatcaataacgtgaaaatggccatactgcccaaggtaatttatagattcaatgccatccccatcaagctaccaacgactttcttcacagaattggaaaaaactgctttaaagctcgtatggcaccaaaaaagagcccacattgccaagacaatcctaagcaaaaataacaaagctggaggcatcacgctacctgacttcaaactatactacaaggctacagtaaccaaaacagcatagtactggtaccaaaacagatatatagaccaatggaacagaacagaggcctcggaaataacaccacacatctacaaccatctgatctttgacaaacctgacaaaaacaagcaatggggaaacgattccctatttaataaatggtattgggaaaactggctagccgtatgtagaaaactgaaactggatcccttccttataccttatacagaaattaattcaagatggattaaagactaaaatgtaagacctaaaaccataaacctagaagaaaacctaggcaataccattcaggacacaggcatgggcaaagacttcataactaaaacaccaaaagcaatggcaacaaaagccaaaatagacaaatgggatctaattaaactaaagagcttctgcacagcaaaagaaactaccatcagagtgaacaggccacctatagaatgggagaaaatttttgctaattttgctaataaaatattagcccatctgacaaagggctaatatccagaatctacaaagaacttaaacaaatttataagaaaaaaacaaccccatcaaaaagtggacaaaggatatgaacagatacttttcaaaagaagacatttatgcagccaacagacacatgagaaaatgctcatcatcactggccatcagagaaatgcaaatcaaaaccacaatgagatatcgtctcacgccagttagaatggcaatccttaaaaagtcaggaaacaacagatgctggagaggatgtggagaaataggaacacttttacactgttggtgggagtgtaaattagttcaaccactgtggaagacagtgtggcgattcctcaaggatctagaactagaaagaccatttgacccagtgatcccattactgggtatatacccaaaggactataaatcatgctactataaagacacatgcacacgtatgtttattgtggcactattcacaatagcaaaggcttggaaccaacccaaatgtccatcaatgatagactggattaagaaaatgtggcatatatacaccatggaatactatgcagccataaaaaaggatgagttcatgtcctttgtagggacatggatgaaactggaaaccatcattctcagcaaaccatcacaaggacaaaaaaccaaacaccgcatgttcttactcataggtgggaattgaacaatgagaacacttggacacagggcggagaacatcacacacgagggcctgttggggggtggggggaggggggagggatagcattaggagatatacctaacgttaaatgacaagttgattggtgcagcaaaccaacatggcacatgtatacccatgtaacaaacatgcacgttgtgcacatgtaccctagaacttaaagtataattatatatataaaaaaaaaaagagagagagaagggatctcattatgttgctcaggttggtctcaaacttctggcctcaagcgattgtcttaccccagcttcccaaaatgctaaaattacaggcttgagccactgtgcctggcaggattttttaatcaaaagttttattttgagataatggtagatgtccacgcagttgtaagaaataatacagattctgtgtttcatttacccagtttccctcaatggtagtattttgaaaaacagtagtacaatgtcacatacaggacaatgacattgatgaaaatcatctgaccttactcaggtttcatgtttcacttttattcacctgtatgtatgtgttgatatttagttctatacaattttatcccatgtgcaagtgcatatagccaccaccacacttatgacacagaacatttccagcaccctaaggatccttcatgttgcccttttgtaaccacactcactgccttccacacccctccttttttgttccctgtagccactaatctcttttccatttctacaagtctgtcacttcaataatattatatataagtggaatgttatagtatataatcctttggaattggtttttattcactcagcataattctctggatatgtatccaagttgttgcatgaatcaagagttcagtctttttattgctgagtaaggagtattctatggtgtggatgtatcatagttaaaccattcactcattgaaggacatctcggttcttttgagtttttagctatttcaaataaagctgctatgaatattcatgtacaagtttttgcatgaatataaattcccacttttctgggatcaatgttcaagagcacaattgccacattgcatggttatcgcaagtttagttttatgataaatggtcaaattgtttttgagagtggctgcaatattttacatgttgttagtatatagaaatgtaattgattttggtatgatcttttatcctgtgactttgctgaacccacagattagtttgaggctttttgtagattctttgtgattttcttttttcttttttgagatggagttttgctctttgttgcccaggctggagtgcaatggcatgatctcggttcactgcaacctccgcctcaagtgattctcctgcctcagcctcccaagtagctgggattacaggcatctgccatcatgccctgctaatttttgtatttttagtagagacggagtttcaccatgttggccagtctggtctcgaacttctgacctcaggtgatccacccacctcagcctcccaaagtgctggaattacaggcatgagccaatgcgcccagcaattccttatggttttctacgtagataactatgtcatctgcaagtatggagagttccacctcttccttttctatctgtatggttttaattttttttgctctattgcagtgggtagaacttccactattgtgttgaataagagtggtaagagtaaatatctttgccttgatcttagaagaaaagcatctagtctttcactataagtatgtatgatgttagatacaggtgttttgtagatattatttaccaagttgaggtagttcccctctattcctaacttgctgaagacatttatttatttatttatttagagatgaagtcgcactctatcacccaggctggagtgcagtggtatgacctcagctcactgcaacctccacttcccgggttcaagtgatccttctgcctcagcttcccgagtagctgtgattacaggcacatgccaccatgcctggctaatttttgtattttagtagagacgaggtttcaccatgttggccaggctggtctcacagtgttcaccattttgaccaggctggtcttgaactcctgacctcaggtgatccacccacctcagcctcccaaagtgctgggattatgggtgtgagccaccgtgtccggcctgaaaagtttttatcattaatagatgttagattttgttcaatacctttctcatcaattgatatgatcatatgtttttttcttaagtctgttgatatggcacacatcgattgattttgaatgctgagccagctttgcatacctggaataaatcttgctttgtcctgtggtatatttctttgcatacattgttgtatttgatttgctaatacttttttgagaatttgtatgtctaagttcatgagacagattgactctctagaatcaatcgcatttctatatactaacaatgaacatcatcctgtagtttttttatttatactgtcttgttttgctgtcaaagatatactggtcacataaagtaagttgagaggtgttcattcttcattttctcaaagagactgtgtgaaatttgtgttattctcaaatagttgttaaaattccccagtgaagccatttggacttggtagtctcttttttgggagtttaattaattaactaatttcttcaatgactataggactattggggttatggattttatgtggttgagttttggtaattgaccaattcatttttgataaaagtactcaggcaattcagtggaggaagaacaaactttttaataagcaatgctgaaataaatgaacagttatatgcaaaaaaagagtatcaagcaaaccctaacaccttatacagaaattactttaaaatgtaaaatggatctaaatgtaaaacataaaattctaggatttttagaagaaaatacaggaaaagtctttgtaaccttggttttgtaagaaagttcttagataggacaccaaggcagtccctaaaagaaaaaattgataaattggacttcataaaaataaaacatttttgctctgtgaatgacactgttaaaagaatgaaaagacacaggccatagaaaaggagaaaatattagctaatcacatatgtgacaaaggacttgtatataagatatataaacaactctgaaaacaataacaactcaattttaaaataagagagcagaagacatgaacagacacttcaccaaagaagatatacggttggtaaatatgcacatgaaaagatgctcaacatcattagtcattagcaaaatgaaaattaaaactacaatgagatacaggtaaatgcttattagaatggcaaataaaacaaaaacccagtagcccaaaatgagcatcaacaaaaactgacaatatcaagtgctggtgaagatgtggagcaactggaactcatatatgggaacgtaaaacagttcaaccactttggtaagtaaatttgcagtttactataaagctaaatataaacttagcaaatgacctaggcagaaaacctatgtttcacacaacaacctatacattaattacagctttgtaattgccaaaaactgcaaacaactttgtgttatttaggccaatagatggtaaatcatttttctacagaagaggaaacctaagtaaagtgttgatggttttaataataacaaacaatttgttcatgcctcctggtatgtatacccctctgcattgtgactttgccacttgttggtttagggtttggccatgtgattttctttgccaatgggacaatagcaaatgtgacactgttggaggcttgaaaatgtttgtacattgggacttactctctcttgcaactgggaaccctccgtcacatgtgaggcctggactagcctactagatgagagatcctctagccaccctagaaccatctgagtcctcagacatgcagagtctcatcaatccccagctgagctggatcttaactgcccagccaaactatagattcataagaaggaataaatgccattttaagccactagattttgggtggtttgttaagcagtaagagctaacagataaagttgatattaaattaacttgtctccaatctggtggacccaaaagcaaattctttgggcctcctttctttgcctctaagcaaagtaaaaaagtggttctccatctttgctgaacattggaattatctagggagctttaaaaaataatgacgtctgggccaggcgcagtggttcatgcctgtaattccagcactttgggatgccaaggtgggtggatcacttgaggtcaggagttcgagaccagcctggccaacatggtgaaacacccgtctccactaaaaatacaaaaaattagctggtcatggtggcatgtgcctgtaatcccagctactcgggaggctgaggcagaattccttgaacctgggaggcggaagttgcagtgagccgagactgcaccattgcactctgcactccagcctgggtgacacagtgaaactctgttgaaaaaaaaaaaaaaagtctggatactactgctatatatatgatttaataggtatgaggtgcagcctggccactagggtttttgacataccaagtgattctaataaacagaaaaggcaaagatgttacctatctaatattggcctgctcggtaacgaacatggaacaaatgcagtctccactctcctgctcgtgtctctagcatacctctctcagagaatatgtagtgacgatattgtgtatcaagctgatctccaacaattgctgctggtgaagcaaatcagagctttaccagtattaagttacttacgactttttctagatgatgctacaggattgacctactctccacggtcccaacagcaataaaaactccaactaaatgtgaccttaagacccaccaaaactcccctaatttgtttgctgaattatgatagtggccactttttaatcctaaatttcactacctgcaataatttgagaaccctaaagttattggtgtagaatatttaacgcctgataatgctgttctcattttttttcctacctaaaaaatatcaactctttgagaaaaggagccagggctctgtatgacttatgtactcaatttttttgttataattatgtgcttgactagtaaaatgagattttacaattaaatgcagtgacttaacgggctcaaaaacagaaaaaccaaacccaatggctcaggttcacagaaaccttaaaatcagactctgattttgaatttttgtgcaattactacattatgattaaacagtttaaagagaacaaaacttttcccctgcagagaatgaaatatgaaacataaatctgtttatagaccatactcataaacatattaagattcatgacctttcagtggtaatatggggagttcacagatgtatctaaagaaataatgttttatttggctgaataatccaacgatcagtgcttatgataaaatcaattccctgtttggatactgtgcatttttctgttataataagcaatttaaatgtcctttttttcttccctttacagagactatttatactcccttattattttgatatcactctgagttttccatcattttagtctttaaaatatatgctacattggtgactttttttttttttttttaaatagagacagggtcttgctctgtcacccaggctggaatgcagtgatacaatcacagcttactgtaaactcaaactcctgggctcatatgatcctcccatctcagcctcctgagtagcaaggaccacaggtatgtatcaccacacttggcttgttatacgcacgcgtgcgcgcacacacacacagacgtgtatatatatatattttgagacagggtctcctgttgcccaggctggagtgcagtggctcaatctcggctcactgtaacctctgcctcccaagttcaagtgattctcctgcttcagcctcctgagtagctgggactacaggcatgcaccatcacgcccggctaattttttgtagtttcggtagagatggggggtctcactgtgttggccagcctggtcttgaactcctgacctcaagtgatgtgcctgcctcagtctcccaaagtggggggattacaggcgtaggctaccacacccagcctatggtcttactatattgcccaggttggtctcaaaactcctggcctcaagcaattctcctgcctcagcctcccaaagtgctgggattacaggtgagagccaccttgcctggtcagtaggtttgatttttaataccccaaatgtcaagtttaaccacaaacctggtcaaattcctgttgtctttcagaagttaccatatttataatttgctccaagttacaagtctggttttatttacatttacttatacagcatatctaatttgactgtcagttgtctataatatttagaccagatgagatccaagagtgttaaggccttaaagatgtgttttaattttaagaagaattaaggtatccttaaactctacagcagcatatccatccttctaaagtattccaaaaatgtgaaggacagacagaagacttttctgttgctaccaaacagaaaaaccactggagagctcatgaatatttcaaatgcaatttacgagcaatgcaactctagaactgcctttaaatggagttgtcctcttaaaaagttaaaatcggttttcagatatttttccagagagtactttgagatgcataaaatggaataaatcagtgctatacaaaataatgaaaatattttacacttttatttacaagttaatttcataaactatacttaacatgactaaacaacaaaaagttcttgacttccatcctttatggctagaaaaataaattattttaatagttatttaaacatgcctcctgcttccagagaaattaatgtattaaatatatatatttttcaaattatccctaacatttacacaaacttgagtagatactgctctatttttacacagaattgtaaacagccttttaaaaagctagagtaactttccactagttagaactgaacattgtaaaatataaaaattttataaaccctataatgcaggtaatttaattatgactgatctgtaggaatatacaataaaaatttgtcagtcatccacaattaagtacaattatttatggagaaaaattttactatgtccagaaaaagattttattcatgttcttgaaagatagctttgttcccaataaatattccctcctattatttttgtacattttaggaaaagatgtattcagttcaaaaataagtaacatccagttatttgactttttgcttttttcttgcttgaaactgctctgttttggtttttatagatttaatcaacattgacaaagcaggatcaatggacttcctttgtgattccttttcaatctcactctcttttttctttattgcctgagtaagttcttgttctttccgttctctttgccgggccttctcctcaaggattttttccatagcttttgttttcttgaaattgggatctgaggggtccaaattgaacaagtgggaagtgtacattgcctgaaaccgtgcatcgttaacatttacctgcaaatccaaaaaaaaaaaaaattaataaattaattaaacaaaattactaaagcaaaaggccagaaatggggccaaatttcgaaagttggtgagttgattatataaaatacaaacctgagtgtttgtactgattcattaggaaactgtttttccatagctctttatggcctacctttggaccacaacttgtggggcaccctgttcttatcatgcaaggacaatgtatttcaaagggaattatagtgggccatacatatacatattatggccggtaactacaacgaccacttagacaaaatgactgtagcagtggtttgtgaggcagggctttcccatgcttacagcacaaaatcaatttcttaccagcataaataagccaatcagaacatctgctggaggccctgaactctgagtacatgttaagaaattttaatcttggtgccaaaataaggaactattgaaggtgatccatggatcaaaagatttaaagaccactatggcaaataatccatctgagatcaaggtctggtcagacacaagccccagatttatcttctttctataaaaacttgtggttccatgtttaagaatatacccttaactgcagccagcctttgagggctgccaggcagatgggtaaccagcagaaagggaaacacacgaaatacaagtccacctggagatagattgtagctttacttagttatcacgaggccaagggatttgatacccagaacaaggaaaaaaatcctgtaaaaaatacttttatgcatatattaatatatgaaggcagaatgactacaaatcattctttgcttttcataaggaaagtaactcaataaaaacctaactggaatgggagcatatgtgaaactgactcaaacaacagaagctacagagtagcccccaaatccttctatatgctacttagaagccatctgtatgctaccctccattgtttgaacaaatttaaaatttcccaaatttcccccatcttactcagggtcagttcttccacattaatggttggaagtcattaagcagtttctaacagctgtttgtagatttttggtagacggctcaaactcatgcttaggggactctgcagccattaggaatatgtactcaacaaaaagaggaaggagtaatggaaacaaaaaacacagcaactgaaaaaacatggcttactgcgctggccactgcacacagtgagtgtgacccactgtgacatgaacctgctattcaagcatacctttgctggtctgaggatcactacatgtgattctaacattaaaaactacacatttttggtacaatatggctaccaaaatacaagtcaactatttcacctggtgctcaaccaaagaaacaatgatttcatccaccctaggatgaactggctgtgctggattaaaagacagtagcctttggctccaccatcagtctttctgaagacattttctttttttttcttttttttttttttttgagacagggtcttgttctgttgcccaggctggagtgcagtgccacaatcatggctcactgcaggcttgacctcctggactcaagcgatcctcccacctcagcctcctgagtagctgggactacaggtgtgcgccactatacctggattttttttttttttttttttttttttttttttagacagagtcttgctctgtcacctgggctggagtgcagtggcgagatctcggctcactgcaagctccgcctcctgggttcacgccattctcctgcctcagcctcctgagtagctgtgactacaggtgcccgccaccacgcctggctaattttttgtatttttagtagagatggggtttcaccgtgttagccaggatggtcttgacctcctgacctcgtgatctgcccacatcagcctcccaaagtgctgagattacaggcatgagccaccacgcccagccagctaattttttttatttttcatagagatgagggtcccactatgttgcccaggctggtctccaactcctggactcaagtgatcctcatgcctcggcctccaaaaaagtgttgggattataggcgtgagccactgcaccgggcccctaagacattttcaagggtaactttgactatgctcaatttctatctgcagagctgactttagattcaattccagctttaagaggctatgcctggtgtctatggttacctcaaagtcatcctctattaattccttctttttcatgagctgctttttcttctttttgctcagattctggtgctccacaatcttgttgtaattgaagtgtttcttactgtcctcgtcctcatccatcataagcaaagccatttcagcctgtagagagcaaaaaaaagttcaaatgtacaacagtgcttttttttccacccccaaaaaggagtatagggcagaagatatctcttctagaaaggaagactcaatcactagaactctggggtaccacctgttgtctgtaaactgactgtggattaccaaaacaaagagatctttgtatagcaataaggtagaatctctggaagcaacattactgagagcaggagaggtaaaaccttgtagttaaaaaccaggccccatttcacttagtgtgactcattagtaggctgcaggaacaagagtccccaactaccctcaaataaaaagttctcattttcactttgttctttttgcgcaatgatgctaaatctagcaaatgtttattttgtgatgcaaattatactttctaaatgtgtaacttttaacaagtaagttttttttttgcttttttttttttggcctttactgtttcaatactgatacatttctatgaaggtaggaccttaggatctgcttctgaaatctagtaaatgtctttttacactaaacgggtattttctaccagccatgggattaaacgagaaccctcaagaatcaagtaaataaccatgtacactagtaaaaatacagagtatgctctcgacctttgtggatcttcctatattaccactttagactgccttaatttccttttgtcactggcacttttagctggcttttcagagacattttccataaaaattgattttctttgttgctctttagataactttatgtggccagtcaggcacacttctggacagtgacatgaacatcagccctaggggcactgctgccttcaattcctgcctcagcaaaatcacatatgactctgtgccaaaattacgtgtgactctggacatagggggtcactgaagcataaggttcactgcatttccaagaatgtaattttgtacgttaaatatacatattcacaataagaaaaacagaaatttgcatttgacaaaccataaccacaaactgtattccaggacagattcagattgaattaaaacttatggcaatattattttgaggttttaagggtattttctgcctcaggtatagtaagtgtttttaaaagtgagataattccctcttaatttataaaagaaaataaatacccttgaatttgaggttaattttaactttgtacaatttggagaaattatgtttggtaaaaaaaacactgtatttagaaactacactgctaaaatatttaattatgtctcttacaatttagttataaatgccactgctaaaataagttgttttttaaaattagtgacatgtacaacttcatttaaattgtacctatgaattatccactaagcatgtaacaataatcgtattttaccttttgtctttctatttcaatttcttcttctggagatgtgccatcttttgcagattttaccgattttttatttatacctggcacaacaaaccaacataagagtggtaaaaattacaggactatcagcaacattctgtttatactaggaacaaaaatataagatatctaggaataatcttaacaataaatgtgttgaaactaaaagaaaaaaacacgttactgaaagaagactgtgggtatatgaatggaataaatacaatgcttctgcatggagtgactgcatgttacaaaggaagaatttctttcaaagtaatgtataatttacattaccaattaaaaaagaaaaaccatagatcatttccacagatacagaataagcatgtccataaacataagaatactgattaacattcaacatccattcataataaaagtagtatacacatttaatgaaattctaaataaaaaattccattcaaggaaatctttagaaagattacatagattccatgtactagtgacatagtgtattaacgtgtactgaaaagtgaaaataaccaaaaaattcctacacaataaaaatgatgaaacagtatataataaaatatagcatcatcattagaaacagaaaagattgtttaataactgctgttgagcaatttgtttcattctggaaaaaaagatcaaattaaagccttatctcataatacataagaaaataaaacgcaggtgaatttaagagttaaatatcaaacaaaataaaacaaagaacccctatgagaaaatacaagggaacagctactgtatcttaaatagaagaaatattttcttagcataagaatactggaagagacaaagaaaaaacccccaagtgatttgaatatataaactcaacactatatatcaaactctcatctgcaaaatgaaaaaacttatctttataataataatttgacagtcactacctgtaaatataagttttaaaaaacgctttctccttctctgaagacaaatctgatctttagtgaactttctagctctattaccaggcaataccaccaggtaaagtggttcctgactggaaaataacatgtattggggtctctaaatgcttataactttgggcttccttgataccgtgactcctgtaactggtaaaacagggatctggaagctatgtctaggtgctgttaaaaagctctcagttcctatttggaacatgagacttctcgcccagggtgactactgtacactgtgtctcctttccttgtacccaagctgtactgctgagtgaactgccgtgaagactcgatgaagagaaacacccaatactgccctgctgtgtttcctgggctaactacccatgagagccaagtgtgacccactcaagccttttgtttgaccacctagagagcctaagaaaatcccccgctgggcactgtaccaccctcagcaagtcatctttggaacaatatgaaatcctatgcccctagatgtgatataatatgaaagataagcattgcctatgaagtatgcttgccaaaaccattcaacatgaatctaatggaaccactcgtctaacttccagtttatggaaaatatagtggaccgagtggcaaggaacagatacatctagaatataagacattccaaaagatcactagcctgggttcttgaaaggcaaatgttatgggagggggaagtgtatatggtatcttctagactatagtgaactaaaaagactactattaaatatgtctattatatagtaacatcttgtataaatacatttttatgatataccataaaagtatatgcatacaaaagtaaaatggcaaaatgttaacaactgccaaacacaggtgctgttcactgtattattctctcaatttttctcaatgtataaattttcataattaaaaacaagaaacggctgggcgcagtggctcacacctgtaatcccagcacttcgggaggccgaggtgggtggatcacctgaggtcaggagtttgagaccagcatggccaacatggtgaaactctgtctctattaataatacaaaaaaattagccaagcgtggtggccagcacctgtagtcccagctactagggaggctgaggcgggagaattgcttgaatctgggaggcagaggttgcagtgagcagagattgtgccactgcactccagcctgggcaacagagcgagactctgtctcgataaaaaaaaagaaaagaaatgactgcttctattataatactaatatctttcacttataaagatttcatgtaaatgaaaatattaacacagagcaaagagaattcacagacaaaaccaaatggtcaataaacagaaggaaattatttcgcctatctcacaaatgttaactgagcacttattatgttgcgatcacagctccaggtgctggtgacacaagccgtgaacaagaggttaaaatcgtctctcatgtagtataccttcacgttgggaaagacagaggcaaagcaggacagaagggttggagactgaatgagggggctggttttgttagggtagttaaggaaggcctcttcaagaaggtgacacacaaacaatgacctggatgaagcgagggaggtgatatgtgagaacacctgaagaagggtgtggcaggagaagggaatggtcaagatggttgaagaattgcagctaatggggtaacatgataagcaaaacctaaagtcaaaagaggctttagaaactcctctgtgtgtattaagtccctgcgaatactcttgcacacctgtccagtagacatgcccagccaagagaacatgccagcataaaagtgctgccaggcttgcctatcagtgctaccaagccatttgttttgcacttccaagaagaaatatttattgtatgcagcccttctccctagagaaaatgctcctcatcactggtcctatctgaaatttttttcagggaataatatacgaatcttaagagtataatctttctctgtcttaatgtatgtgtatgtccttacacatataaatatcatcaaggttccacttgcttagggtatgaaccccccattccctaaatttaccactgctcctatgctctcaagccaagagctccttttgaaatgaatggacaaatgacatatgcaaaatattattctgtagcagggagaaaattagactgtatataattaatatttaaagcagataaagatcttcacatacagctgtggaaaataatttcaaaaagcccacaataaactatttcagattttataacaacctggtgaagagtcttaaaaataaacttgaaaggaggactgtaataagggagaaagaaaaaaaaatccccaagatagggctaaacatgatatccggttttagcatgaagaaaatttctttgctaacaaagaatttactatgatgttagactgaattgtttagtgaaaagataaacaatgcatacagatgatttctgcactgttaataagatcaaatattaagagatcacatctatatttttttaaaaaacattttttcctccctggaaaaatttcagacttaagttagatgaacagtactagggaaatgaaagtttgtgttctaaaatattgtctttatttttcagtcaatcttttgtcaagtaaggaaccacatctctagctgggtgtggtagctcacacctataatcccagcactttggaaggctgaaggaggaagattgcttgaagccaggagtttgagaccagcctgagcaacaaagcaagaccccagctccacattttttttttttaaattagccaggcatggtggtgtatgcctgcagtcccagctacttgggaggctggggcaagaggatcacttgaacccaggagagttcgaggctgcagtgagccataatagcaccactgtgcactccaccctgagtgacagagcaaaatgctgtcaaaaaaagaagaaaaaaaaaagaaactacatctcctgggactgctgcaaaaaatacatatggattgattctattaagtcaatactaacagagactccgagtcagatattagagttttacagttaaataaatctaaccaatccttactgaggctagaatccttttaggcaaaaaatgtaacagaatacatccatggaaaaagatagtgtgtaaaaataaaattcatctgtaaaggaaatttcatttcccattacttataatgtcagagacttgttcccataataaacttcctccagagggtttagttgagcaattcatatgagagaagctaagaaagttcactggagggcagatggatgtggtctcagtactgaccagatgggagtggtaagcgccctagtgatttactcttttgtaccaagttcctgcatcacttgcccataatcagatgcagtctgttaaggataatctccctctagggttaatctccctctaggctaccacattctggtgctgctttacaatgttgtaaaattacaaaaaataaagggaagcccactaggactcagattctaccagctaccactggaaaattagcagatttttctaatatttcatttcattttcagctcattaatgtgctcatcctagatgatatttttaaaactctcatttgacaccaagtttgcaatttagaaggaaatcaaagaaaaaattataaaagatagaagaaaaaattataaaagatctctaacattcaccctggcacctaatctgagccaaacgccaggtctggcatcaatgaactcatttcctccacattttgaaggcacataagtttagctctatgggattgcctagagcaaaaatgttataaatgtacccaagtcatctggtttacaatgtttttgtcctgtttaactacagaacttgaactgtacactgaaaacactagtgtgccaaattcattatatcttaaatatttttgaaaagcaaggtctatatccttagataatgactatattttacttccaccaggtactaaaatctaaaattattttgacaaactaataatgaaggcaacactgtagtaataaattaatataccaatgtaggtcatctgagttattttatttctacattttaaaaattacaaactggctgggtgtggtggctcacgcctgtaatcccagcacttctgggaggccgaggcgcgcggatcacctgaagtcaggagttcaagaccagcctggccaacatggtgaaaccctgtctctactaaaaatacaaaaattagctgggcacagtggcacacacctgtagtcccagctacttgggaggctgaggcaggagaatcgcttgaacccaggaggcagaggctgtggtgagcagatactacgccactgcactccagcctgggcgacacagtgagactccgtctcaaaaaaataaataaataaaataaaaataaaataaaaattacaaactggtaaattttgaaccaaagtccaactctctttaagagtacctactacagatccttatatctggaaggcacacaaaaaacttccaacttcttcctgactccctatgggaatccatttccctgaggttataagcatgcttccacctatccttaaaaccatcctcctggatcatgagtacaaaatgttaacattcaatatattcttccttatgtcttctggatactgttaagcacaaatttagtttttgctggggaggaaaaggttcagaattgagtaaaaacttctcattaaatccatctatttgagcatatacatgatatatatctaacacatattttaaaagtccagttataccataggaagtcagattaaaatgtaaagtatgggaaaactgtatcattctcatatatttaaatattttgtaacatgctgaaagtcatatgggaggactgggtgattctgacactcaataattgttgactgaataaccacgtacatgaatgggggcacacagctttgtaatgtgcctttgaaaagccatgtccagcatgatttaaaagggacatgctccttttgtggctcagctggttctctctttctctgcctaggcctcccataccgctgctcttgccacatgttctatggttttgtatctggcctggccttcaaatttatacgccccatctttctccattttcagccatccagacctgaacactctccttaaaattgacaattaattgaatcaaccgccttaggcagtaacctcctgcaccctgccccctccagtgacctgtttctacgtccctaccctatctgctcatgcagattatctgtgcttctgcaagtgaatgaacaaacagtataaatccataaaccaatcaggtaaatccctcatccttctgccaccaaatatacaaatttatctgcatttgtatttacttttatttcccccattttctgtatcttagtaacttcttttctgttggaacaatcccaagggaaagaaaacatgccctaaaagctcatatctttaaaaaaataccttctccttacctacattcaggtactgctccacgtctttgctccccttcacagtgaaacttctgaaaaaagatctacattcttggtctctacttccttacctttcacctcaaactttaacccacactaatctactgaaacctctaccacctcaccaagtgtctgtgagccactacattaatactgttcctcctatttcccagccgccgcttctcagcttcttaagcttttcccatcctttcaggtagcacttcctccagtatgacagattaacagtgcctcatgtggacttcacctgaccttagggcccatcctgcatcctcttctcttatcactgctctctactcgcactgccatggtttgaagtactatttacatgctactgatccttaactctatatttgtactctgatttctctgctcatctctcagacttatatctcaatatcaaccaaacacctccatttgtatatctaattgacatctcaaagtgattataccacaaatggacgtatttactttgcttcccactcaaacttattgtttccacatttcttcctcagtaaatggaagaacattcttccatagactcaaaccaaaaacagaagttatgctaaatttcttcctgatttagcaagtatacttccaaagtatatctagagttccattctcttctccatccaattccacgagcggcatgccaggtaaacaaccattatctttggtctagagctcggcaaaagtctggtcttccagccctcaccagtcctcaaactgttctcttcacaggcaccagagtaatatgttaatctataccagattatgtctcatctttgcttaaagactgtttgggctttccactatcagtaaagtaaaatctaaatttgttgtcaggacaacaaagccctacaggggtagtttccactgagtctccagcctgtcctcataccaattccctctccgacaatgctccagccacactgatgtctttcaattcttaacaccacacagtgcattctcaccttggagtctttctacccactctcccctcatttgcaatgctcttcccccagctcttcatgcctgactcctcattccacaggtctcagctctaatgccatcatctcagagaagccttctttgcctacccaatgtaaactcccatatctcctacttctatccagttatatcttctatttctttccttgaaaacatttaccataccctcatactatttatctgtctaacatgtctttctttaaaccagactccatgagggatgcaatcctgtttgtattatcactactgtatctctagcctagcagagagctcagcacctggtaggcaatcaaaacagttattacagaatgaataaacaaacatggcaagacactagctttttgtcctaaattttatgtaaaaaattctggccttgctgttttgctttttcaaaacaaaacaaaacaaaacaaaacaaaacaaaacccactgcaaaacacacacacaaaaacagaaaagcccagatagaaacaattaccctctgggaacactctgaaatcaaaagtaaattataagcaagcaaattttatctataccttttttctttggaacttctgataataactttacagaaagcttactctcaatttaaatgtgttgattccaaaaaactggctaccccaagccatcaaaccatttaacttattctttgaatcctattctgagttctgcaatttgaccagacttcacatgccaaaggaaacattttggatagagaacaaggaaactataatgcttagcatttctccattataaagttggtttcctgaaaccagaggataaggctaaaatccatcatcttctagaaatgaccactcaggtatgataaaaagcagaatatgctaagtttccacttctctgtccaattcccaagaatctcacattctataatagactttatttatcttaatctccttctcatcaataaaatgtcagtactaaaaagctgtaacaatcaggaagtaattttgagcaattctgactttcctgttgagaactattctggcccactagtcacaagggaaaaaaacagggaaacttcataaactccttctctttacaatgccagcgtggagttgctccaggagcaagccttttggggttcttgtgtgtggtataatgatcggggaaggcaaaatgcatgagaacaaatggtaaatccttacagtgatttctgtactgacttaccaagtatggcctgaaccttaccaaacacatttacacatacgcatttcctccacataatggaggaaagaaagaatgagtagtgcatatgaggtggaaacaaggctccctggatataggaaatcagataccagataatttagggattcaaggaaaaagaggagtaaggaaagctggctttctagctataattaagcataatgagtacaaaagggataaaatgaaacatagatgcttttgtatgtttcagcagaaaaagcttttatatgaaatttcatgcataaatttaaaaaaattatacacatatcaacatgcacataaaaacaaatttgtttcatacttttaattcttgatagactttgctgagagggacctagaatggatacgctattaaaaatcagtgaaagtacacaagaaaatatttattcctctttctatttcctctcattcttttatagagtcgatctgactggcactaaggatatttcccagaaaggaatccccagtaaactattaaccacattatcaaaagtctcctatattaaaattatcccttgtatgtagaagggacaagttgacccttcccaatcagattaatgactgtatgccacaggacagacttgcttatgtcactaagggagctacacaaatactagcaattttaaaagaatgattagtttatattgcttccatgtacctcacctttttctttagattccagttgaaaactacagatatgagctggcttacctatttgtttaacttcttcagcaaagtatgggtcattcaaatcaacatcagagggaagttcctcttcactggcctcttcagcaagagccttaaaagttgaatataaaaatacaaaatttcattattacaagaattataataaatgtataccaagaaaaactatgcatttcttttaaaccaagtagttcaatctaaaagtaaatcagtggccaagcgtggtggctcacgcctgtaatctgagcactttgggaggccaaggcgggtggatcacgaggtcaggagtttgagaccagcctggccaacacagtgaaaccccatttcttctaaaaatacaaaaaaattcgctgggcatggtggtgcatgcctgtagtcccagctcctcgtgaggctgaggcaggagaatcacttgaacccaggaggaagaggttgtggtgagccgagatcgtgccactgcactccagcctgagcaacagagcgagactccatctcaaaaaaaaaaataattaaaagaaaaaaaaagtaaaccagtttttaaatggaccagtttataaaacaactcccacctaagttattctgtttgttcaacaaataattatagaggctgggtgcagtgactcatgtctgtaatcccagcactttgagaagctgaggtgagcagatcacttgagatcaggagtttgagaccagcctggccaacagggtgaaaccccatctctactaaaaatacaaaagttagccaggcatggtggtgggcacctctaatcccagctacttggcaggcgaggcaggagaatcgcttgaacccaggagacggaggttgcagtgagccaagatggcgcaactgcactccagtctggcgacagagcgagactccgtctcaaaacaaacaaacaaacaaaaaatatagaatacttaataaatgcaggaaaccatgtaggccttttgggagaaatggaagttatcagatacatggtttctgccctcaaaaattttaccatctattaaaggaaatcagacacataaacacataaatagacaaatacataaataaaaataattcaagataggaagggttaggagggacaaagtgatgcagacatttgaaggagaagatctgaaggagaagaatacttttagatgggtgatcagtgatgggaggtggcattttctctcataaaactgaaaaatgatagtgactgaattacttgaagtagtgcactgtgaattatctcttaaattattagttacaacaatttatttgttggttaaagaaaagaatttttattatgaaaatctaaaacatacacaaaagtaggacaatgtaatgaaccctctgttctcatcgcccaattttaacaattatcttgttttatctataagccacccctaaaaactgtcaggctatttttaagtaagtctgttggttaaatttttcctaatctaatttgaacagactttttactaaattagcaaatttaaataaagcaatcaaatctatacaataaatagaacacatgtgaactaagatcaggctaaccagactgaatttatctctagcaatctaaaacatctcaagtcatttaaacaaaaatatttagaatgccattattgttaaacatcctgcatgcaaaaagaatcactaaagccctaaagaatatttattttgacattaatgtccttttaagaacaagtgcttctggcttttttttttgagacaagagttttgctcttgttgcccaggctggcttgcagtggcgtgacctcagttcactgcaacctctgactcccaggttcaagcgattcgcctacctcagcctcccaagtagctgggattacaggcgcctgccaccacacctggctaattttttgtatttttagtagagatggggtttcaccatgttgggcaggctggtcttgaactcctaactttaggtgatccgcctgcctcagcctcccaaagtgctgggattacaggcgtgaaccaacacgcctggccaagaacaagtgcttttttttttttttttgagacggagtctcactctgttgcccaggctggagtgcaatggcacgatctcggctcactgcacgctccacctcccggattcatgccattctcctgtctcagcctcccaagtagctgggaccacaggtgcccgccaccacgcccagctaatttttttgtattttcagtagagacggggtttcactgtgttagccaggatggtcttgatctcctgaccttgtgatccgcccgcctcggcctcccaaagtactgggtttacaagcatgagccaccgcacccagccagaacaagcgcttctaagaatttttttttttttttaccaaactattttatggattcagcagtaacatacttttaacaaagaatatttgctatgtacctactcaacacatttctttaactgctttatagatctcaacaacagctagatcaaaatactagataacacggcatatatcaggtattcatttcttcagtaataatttttcagtatcaaaattgaaaccactgaggaacaaatgggcaaaaatatttttaacttgaagaaaattcttgaaactcttctatatacaaagaacctgtggagttggaaaggatctgttggagtcaaggccggtactgagtactgtagggtctagaacaccctggacactcaacaatgtattttgaatgctgctgaccaacgagtccagacttagcccaaatgaatggaaaaagtaaaagcacaaactcgaagctcccagcaaatgaaaatcaaactgaatagctgctacaattctcagaatgactactttattgaccccatgagggcccacttgagacatctccaataaactgatagcttaacacttgtggagttatttcatttataagatattttactcactttgggaggccgaggcgggaggatcatgaggtcaggagattgagactatcctggctaacatggtgaaaccccgcctctactaaaaatacaacaaaattagccgggtgtggtggcgggcgcctgtagtcccagctactcgggaggctgaggcaggagaatggtgtgaacccgggaggtggagcttgcagtgagccgagatcaggccactggactccagcctgggcgacagagcgagactcggtctcaaaaaaaaaaaaaaaaaaaaaaagatattttactgcctactgagtttgaaaaggagttctagggaagaagagagttagttagcacatcaatgggagcagggctcttaccccacgtggtgttacatatatattattttcatacatggtttctggctcataagttccttagcccttgctatagtcttttgtgttcggtcttaagggcaggactgtactcttccctcacctttctaattgtgcatcttaagaccttccccagagagggtcctgccctgtagttgtggggaaggaatgctggcatcatgaagcttccataaaaacccgagaaacgagttcacagagcttctggatagctggacacatggaggttcctggagggtggagcgcccagggaggcatggaagctccacagcccttcccccataccttaccctatttcctctgtatcctttgtaatatcctttatgataaaccagcaaatgtgtgtaaatgtttccctaaggtctgtggccactccagcaaattaattgaacctaaagagggggtcgtgggaaccccaacttgaagccagtcaatcagaagttctggatgtccagacttcagactggtgtctgaaagggtggaggcagtcttggggaccgagcccccaatctatgggatctgacactatctccaggtagtgttggaattggaggtcacccagccggtgtccactggttagtgtgtggagaaaactccctacccatttggtcacagaagtcttcttctgtgttgatagttgtagtgtgacagcagaggaaaaacaaagtcagaaagagtttttcccaaaacacccaatttctccattttactatccatttccacaaacactgactacaatagaagtataaaaattactccactgcatcattcagctttgcatctctctacccgtcacagcactaaaagtcaaagctataccaaaagcattataagaacacacagtatagaaacagtatagtggggaacagaagaaagaacactggtctgagtaactgtggattctggtctcagcttggccactggtatgctatgtaacctcagactaatcagctaattttttttacaactataaaacagggctggactagaattaataattttaagattccccaagctgcaaaattttgtcattatcagtaataacgctctaaggcacaccacttccagaatgctgcatttcagtcacaagagcacttttagtggcaaaaacctaagtgatctgtactattactgaggactctggaaaactctggaaaagatgctattccctgaacaacatgagtcaaatcatattgtccacagaaaccacattaacacagaggaaatactcttatttatttatttatttatttatttatttatttatttattgagacagagtcttgccctgtcgcccaggctggagtgcagtggcacgatcttgactcactgtacctctgcctcctgggttcaagcgattctcctaattcagcctcccaagtagctgggattacaggtgcgcgccaccacatccacctaatttttgcatttttagtagaggcagggtttcgccatgttggccaagctggtcttgaattcctgacctcaggtgatccacctgccttggcctcccaaagtgcacggattacaggcataagccaccacacccagccaggaaatactcttgataaaggaatttaatgacaataaggtgacagatgagccataagataatactgtaaggtgaaaatgcaggttgacagatggaaagtatggcataatttcactcatgttaaaaacctctatgtgcatatatcctcaaggaaaaatgtctgtatgtacctcttttgctcagaaacacagaacagaatcatactgcttatatctagatattaactatgtgttttacgtaggtggcatgtaaatgtaaaatgtcagaatgcagcagttgaagtggctctggactgtgaccaggctttgtacaccattatgtggccatgatgaaaaaactttctgcattctcactttcctctttcttaaaattgggatgataacaaggcctacttcagtgagtggttacattttgagataatggattccaagcacctggtaccatctgatatatggttggtattcaacaaacatttggtcataattatcaatgataccttctgtttccttttcagtctttttttctctttcttcttctctaaaaattgttcccaaggggtcagtttatcctttccttccaatttgtttttgaccatctcttctgcactttctttaagacctgaggaaaaatccaaatagtttagcttaaaatgtcttattgtctggcaatcacttaaacatataatttataaagacaaatataatttatgcatatttaatagagtaacaaagataacatgcaatggtaaatatctgtaataccccaatatcatacagtgacataggaccaacttctataaaagttatttcctaataacaaacaacaataacctaaccaaacaaaatcaaaacaaaccaacaaacaaacctagcaacttgatacatggtcaagccactaaagaaaaatactgtatttaggctcagccttcatttctctaaacttttctgttttgagatgctaagaaaacttctgaactaattcttctcaggatactaattaatttttgtagcaaaagacaagtggcttttcttgtctttaattatccccacttgcttctgtcatccaagtgaaagcctatgttctctgcaaactacaggttttgaacaaaaattgtttagtaaggaatccctgttgaaatatcccatgagcaaaggattctcaatcttttctcaagcattctgtgaggcctcatagaaaagatcagaaggaccaccaagttcagattccatttcatcatatggtttagctctttcaatgctgctatttgctcttatatttcatctcaaaaggtctttcttcctatagtctgctgttcccgattcacgtttctaggtatcttatgcaataactagagggggtaacaaggtgggagaaaaagccctaaggctgatctatccatttacaaagaccctcattattgccaaagtaaaggaaatgtaaatactgtgctgtcccctttgataataaagatgttttttattttgtagtagtgtttagaggacatagttgggtggatctttaaatatttagatgacacaaaattcattaaaaaaagagacatcatcaaaccagatcatcttctcagatacattctaaattctaagaaagtagaaacgatactaaatacagttctcttttgttgatgagtatatacagactgagaacatttagcaatttgtctaagaacatggaggtaggaagctgcacagctaaattttgaattcctggtcatcctctcttctattatcagatacatctaaaatgctagtttgacctacagaatgaagaaatatatggcccaagaataaaatctaaaactttgggcctctggttccttatctgcaaaatgaatggtttagatcagaagtatgcaaccctttcctcccacgtgcactgatttccccccctcaaaacatttggtaaaagtaaaaatatataaaacaactaaaaacactgcttttgggccttgagcttcaaccaacagtttgaaacagctgaaacagatctctaagaccttccttggtttttaacccaagaattaatctccaaatttctatagcttagaaaagtattaatgttaacctatatgcacactcaaggtaacacagatttgtttttatgacatactgctgttaggatctctaacttacaggatgccaaatcagaacacaattctcaattcaaaaatgtttcttatgagaaaaacataattcatttagtaaacagttttcaggagaaatgtgtaatataaaaccatgtttagatctctgattcaacagataaacagcacctaagaaatgtaaactgggatgttcatttgagagaaagcagcaaattctgataaaacaagttgatttcaaagaacaaaataatttatgtattctgcccataggtcagcacacaatcagttcagtctaaaattttaaatgtacagtgttgtattattacatgatgtttaaataatactctttgaagtattctactataatttcctcatgcattaagattgtattacttcaaaatactaaactaatatagaaattttttcaccaaaaaagttattttctgattttgatccaagctctacttctgaatcaccatgatgctaaggagggttctatgttgttgtctcttaggtgactagaggactgggttgatgtgtctcaaccttttttggagggatggatagcatgagattttgataaaagttatggactctaacactgtactggaaaaacttgcatccaatgttcaggaggtttatgactatccaaagatcatctctgtgtaatgatccaagagcttaaggtaaagaacatttataggagctgaagaggtctagcctgggggaagatgaaagtccattcctgtaactttgaagcttaacagcattgacatttgtaggttctacatcaggttttctcaatttcagtattattgttattttggaccagataattctttgttgtgacgggctatcctgtgcactggaagttattcagcaatatctctggttatccactagatgctagtaactccaggtgtaataataaaaaatgtctccagacattgccaaatatcctcttggggggcaaaattacctctagctaagaatcactgttctagacaatcattaaaaatcatttctaaaaaaaagggctatgtcaatatttgaaccacataagtgatggtattttacttggtgcttgattatatgtcttcccaatttataagtttcatctgagcagtcctttcttctaactagaccaaaagcagcttaaagtcaccttctttagtatttcataatatttagcatagtgccagacacatagtaaatacttaataaacacttaattgatctgtcttaaaggagggattcttatttcaagccatctgtttgatctttcatgtttggaacatattctctctaacagaaaatgaatcaaaactttaggatcgaaataaatggccttgatcctcaagtggttcatgtggttaaaaacaaaaaagaaaaggacctataactctaaaataattcgtgaaatgtttattcttaggaaataatatttttctggtactttgtttacaacaataaagaaacagtatcttcagtttaatacagtctgtaatttttttttgcctggctctcacttaatacacccaaatagcagcataagaaacacattgcaatgaattcacacaccaccatgataacttaaaaaatgctttgttcttgttgtcatcatgaggtcatttaaatctcttgccacagatcacagctgtttatgttctaagttcttaaaaatatgcccatcccagaagcctcttggcataagtacgagaacattcttcagagacagttttagcctctgagagcagccactatgtgactgaaaaacaacttcattgtaactgcttttagttttgcacaaatttgtttaaaaaattttaagtgcatatccaaggacttctgaattagttaaaaataacatcaataatcctacaaataaggggcaaaaacatctttcacagccaaccacaaacatagatgactcaattatgacaataataatttaagcacaatccattcagaattattctggcagtttgcatacatataaaaatatttttaaatatccttgcaaaacacacaaaaataagagtatacattctgcctaccttattcatttgaaatatctgaaaagtcttcaaagggcaggagatgaacaacttaaaataactccactaggtactataatcggctttggttataaaaacaaaatgtatatttaaacatttctgatataggctgaaaccagcactctttatttaaacctgactctgtaacactcaattccaaaagtagcttttaaaatctaaccagccaccaccactgccaccaaaacttcaaatttggaatccactctgagtataaggctttttttttgagacagagtcttgctctgtcacccaggctggagtgcaatggtgcaatctctgctcactgcaacctccgcctcccagatgcaagcgattttcctgcctcagcctccctagtagctaggattacaggcgcacgccaccatgccagactaattttttctgtatttttagtagagacagggttcgccatgttggccaggctggtcttgaactcctgacctcaggtgatccgcccacctcggcttcccaaagtgctaggattacaggcatgagccaccacacttggccgaacagagtataaggatttttagaggaaaaccactggccatgccctgaggaacagtgtcatcaaagacactccttcaaactctccaccccaatggtgtagggagaaggaaggacacattcactcacataacaggggtcacaggatatttggtccagataagtaaacgggatctttgccagggccattttttcctccttggtaaagtagggtgactatgtgcataggatatccttaaagcatattggataagccaagtgatcaatctttcaaataaaacatatgaagatctgaagggttttgaacttggttcaggatcttacaatttcttgtatgaacttctgtaaatccctctctcctaaacttttttttttttttgagacagggtcttgctgtgttgcccaggctggagtgcagtagtgcaatcacagctcactgcagcctagatgtcccaggctcaagcaatcttcccacctcagcctcctgagtagtgggaccacaggtgtgcatcaccatacccagctaatttattttactttttatagagacgtaagtctcactatgttgcccaggctagtcttgaactcctgggctcaaatgatcctcctgcttcagcctcccaaagtgctgggattacggtcatgagccaccgtgcccagcctctcctaaactcttacagtactatggtcttttattctctagcatttgtcacagttggaattatatattcatttgtggaattgtaaaaattattattaatgggtatctctcttaacaggttgcaagctccatgagggcaaaggtcatagcctgtttttctcttgctggtaactctagcggccagtgaaaggtgtgacatacagcacgcaccttataaatgtctgctgaataaagaagcaaataaaagaaaaaaatgagtcaaatttgttcccaaccttacagactaggaacaacaatgcttaaaattaaaaagtaaaataactagccttgtgaacaatagtaaatagcaaaaatgaccaatcaggcagagccaacaaatactctttgggtgcacttaacactatgagaatagtgttatacagaaacacagtcataaggataataaggatgagggtacaggaagctgcttagataggcaattgcttcttatataaccctcaattctatatcttccaaaacattcagtgaagcatccatagaaaatatgcccaaagtatgtgatcaatgaacacgtttttttttgttgctgattgtctaaaagctatttaactgggtagaaattgctttacatttgtcttgaatttgagcttatcatactcttcttccaaatcgccttttactctcccttgaaatgatgtcttccacttacaatcatatttagtttactgtaaatcaagctgcccctgcttcttagaatcaaatattcttaaaagctaacttcaaatacaaaacaacatttgggcctcattagggagctattgtttcctgtatttgcctgtactttatttgtatgttttctttgtctttcaagtagtttgtaatcacaatgtacacaatatcaagctatcctagtactgataaactaaaattctggccaagtctggtgaagtcattctgctaattagtttacggcaaagaagactgaagaactacttgttctattgttatttttatacatgtttatggacaaggtcaaaaataaatgaaaacttttagatgtaagaaaacaaaaggaatttcttggaatccagtcacagtaagaaagttcaaaaaaaaaaaaaaaagaaagctcaaacggaaatatcaaactagattagaagcaaggagttttccttggggacaaacactgatctgctatggtcttatatggatctttggttgtaatgggttgctggccaagaagccagcacacagagtttgaagcctgatcacggtgggaggtcccagcagagaccactacattaagccaagatgcttaagggtgctctcagtgggtgatgtcccttcccccacaaatcagagagaacacatgcctgtttgggctttggttatgggcagaaagagggaagtaaaaatacatttttcccccatagatttataaccacaaacccctgggtttgtggctggaattcacactacttgtgtggcccaaaataatccaatccaaaaactcagcttcaattggtgttggattggaagtgccctcaggcatctggcaaatattttttaaaagaagtacttttgacacaggcttctgcaattcccttaggtaaagaaagattcaagaacaatgagatcacaatcaaacttcacagaaacaaactataagaaccataaagactatgaatattggaattatcagatacaaaatatatatcagcacttttaaaaaacaaaagaagaaattaaaagatcagactaacaaaaggataagactagaaaaaaaataaacagcacactagacagaggtaaagaaagaattaatgaactgaaaaacaaaagtgaagaaattacccagcacgttgtagagattcaaagggatggaaaatatgagttatcagattcagagttagaatgtactacacatattaaacaggatttccagaaggagaaaacagagaagattgggaaaatgtaatattctaagagaaaatggtggaaaagttttcagaactaacaaaagatgataatcttcagtattttgggtatttaattccaagcaagattaaagctaacaagcaaaaaatgacctacatcagagtgcaactctagaacacctaaaatatgttaaaagccaggtacccaagacaacactgtagagcaagaccacatctctcctgacaggattcaaaagtgggccctgaggtattaaaatacttgttctttagtcacactggcttcctgacttgcacaggagtcaagaggaagtcttgtgagctcacagtaaaattgccccttcccagaaagaggctaagacggggactggcttggtgcatccaagataatagccaatacccttccctccctaatcctcaatattcacagcctcactatcacaatctgcccccaggaatcatcccaccaggaataatctatttatgccttttctccctattcattttggtcactgcaaaaagcccctaatcatcttgtccccctaatatcccatgttctcatccccagaaggtaacaatacatcaattcttctgccccattccctgccaactctctatcactaaattctgtggaactcacagtacatcatcagcagaatctcattatatctctgagcattttctttatcttgttctaactgaaacctggctctccaccaaggataccacatactacagtcctttcaattgttgcttttggtttgcattttagttcattttcttcacagaacccccatacaagctggcctacaggtgggctagatgtggtggtcgttaatgttcttcatccagttttctgaagtgtggtactggtctagggataggcagacgaactgaccagtaaaacacagagccaagcaacaaacccacagttctgaaactctggtacatgagaggtgacatgtcacattactagaggaaaggagagattattcaacaaatggaacaagataaaaaagattttctatatggcacaagataaaatcaggtccctacctcatattaaaaaaaacaactcaaggacttaaatgtcccaaaccttacatcttttagtaaaaaatcaaagggaacattcttctcatctggacaaaaaagagtttcttagataaaacagcaaatattaactataaaagataaatctgacaatattaaaatcaagtattcttgttcattagatgacagaagaaagtgggagaagagaggaattacaaattagaagatattagctgtcttatacaagacaaaggatcagtatcagaagtaaataaagagctgctaaaagccaacaggaaaagcacaaacagtacaacagaaaaatggccaaaaaacatctattagtatttcacagagaaggaaacacatgttcaatctcattggtgacaagagaaatgcaaatcaagtactgctggtggaaatgtcaagtaatatcaccacccttataaagttcaacattcatggtcaggtgtggtgactcatgcctataatcccagcactttgggaggccaatacgggtggattacctgaggtcaggagttcgagaccagcgtggccaatgtgacgaaaccctgtctctactaaaaatacaaaaaattagccgggtgtggtggtggacgcctgtaatcccagctacttgggagtttgagaccagtctggccaacatggcaaaaccccgtctctactaaaaatacaaaaaaactagctgggtgtggtagtgagtgactgtaatcccagctacttgggaggctgaggcaggagaattgcttgaacccaggagatggaggttgcagtgctgagatcacgccattgcactccagcctgggcaacagagtgagactctgtctcaaaaagaaaaaaaaaaagttcaacattcatataccttatgactcagcaattatactcctaacacaaatacccagaaaaacttaaacgtgtactaggggacatgcatagaaatgttcctaatggcatgattcatcatagtaacacctaagaacaactgaaatgtgacaggagtatgaatatacaaactatagtatagaagttaaatggatgacctacagctacacaaaataaatcttagcaatataatattaagtgaaaaaaaaatcagtcccaaaatgatttaaaagtatcccaaacacacccacacttcctcccacattaacaaagttaacaactttaatatcacagatatgtgcaaataccaccacaattttagaacattttcatctcttcaaaaagaaaccctgttcccgccctccctcctgtggcaaccactagcctactttctgtctctatagatttccctgttctggatacttttgataaaatatgtggtcttgttgaccatcttctttcacttagcgtagtattttcaaggttcatctatgttgtagcatgtatcagcacttcattcctttttatgtacccattatctcttaagaatatttataagttatataaaactatatacaatgttccaaagaagacatacaaatggccaacaggtatatgaaaaggtgctcaacatcacgagtatcagagatgcaaatcaaaaccatgatgaggtattacctcacacttgctaggatgggtattttaaaaatgacaagagataacaaatgctggtgagggtgtgtacacggttggtgggattataaattggtacagctattatggaaaacagcatggaggttcctcaaaaacttacaaacagaactaccataagatccagcaatcccacttctgggtatatatccaaaggaaatgaaatcagtatcttgaagagacatctgaacccctatgttcattgcagcattattcgcaataaccaagatagggaaacaacctaagtgtccatcagcagatgaattaataaagaaatagtggtacatatatacaacaaaatattattcagccacaaaaaagaaaatcctgccatttgtgacaacacagatgatcctagagaacatattatgttcggtgaaggcagacacagaaagataaatacctagtagagttcatttatatgtggaatctaaaaaagtcaaactcagaagcaaagagtaaaacaatggttgccaagggctttagggtggggaaaatagggagatggtcaaaaaataggaatgttcagtcacaagatgaataagttctgggatctagcgtacagaatgggtggtgatggatgtgttaatatcacgtagtaatcattacacaatgaatatgtatattaaatcatcacactgtatagcttaaatatattcaatctttgtcaattaaatatttttaaaaaactatatacaatggaaagtaaatgaataaatactgaaatctggataatggtttcctcaagtatggagtggcaggggaggatcaaacaggtaaatataagttattgcaaggttctagctttcgtagtgggtggtgggttcacttattcattataacaaacaaacaaaccaatcaataaaaagaggcccatgccggaccattgatgagagactgtcttaatctatagattatgattactccaattatgtacaccagagatacttaaaaataaagaggttaagtttaatgaatttgaccatatcacacttctgttcttcaaaagacactataaagaaagtaaaatcacaaaccaggaagagacacctgtaaaacacattactgataaaagaccagcccagaatatatgaagaactcctaggaatcagaatcaataagacaaagaatacatgaatagacattctacatatgaggaaaaacaaactgttcctcctcattagtaaccagggaaatgcctaagtatttctttaaaaactgaagtcaggtgacatcatctccatttcccatctcacacagggtgaaagctaaagtccacccagagatgtagaaaaccctttgtgatttggctgcctctctgacctcatcttctgctttccataccctggctaactgtgttccagccacactggcctccttattattcttggacacatcagtaatgtttccccctcagggcgtttgcatttgttgtttcctctccctgaaatgctctttcctaggataacacatggtgactactgtcatttccattaggtctttgctgaagtgtcactgtagcagtgaagccttccctgactatccagtttaaattgctactcattcccaaccataaacttcctattccccatgtaggctttaggcttttgtttccacaagctttaatcaccacctgagattgcatatattttgcctatttgtttactaacttctctccctccccaggccacacacaatagactgcagagcccattgaaggcctggacctttgtctattctgttcaatactctatgacaagaacagagtctggtatacagtaggaactctcaatatctgggaatacacatactaaaaccatgagacaccattacttatgtactcaaatggcaaaaatgaaaaagcctgataatatcagttaaaggtaacgataaagagctatgggaactcacactactggtgagagtataagatggcacaagcatttgggaaaacacatgacctagtagaggtaattacgagcatgttacaaccaagaaattctacatgtatccaagaaattccatgcgtatcttcgtgatacatccaagaatattcacaaaggcactgtttcataacagaaataaagtataataatgagcaatagaacagatacattgtgataagttatacaatggaattctctgtagccatgaaaatgaatgaaccatatacacatatatggatatggctaactctcaaaaatagaatgtttaattttattttttactttttagagatggagtctcgctctgtggcccaggctagagtgtaacggtaagattttggctcactgcaacctccccttcccgggttcaagcggttctcctgcctcagccttccaagtagctgggattataggcacctgccaccacacccagctaacttgtatttttttagtaaagacggagtttcaccatgttggccaggatggtctcaaactcctgacctcaggtgatctgcccacctcagcctcccaaagtgctgggattacaggcatgagctaccatgcctggcccagaatgtttactttttaaaaaggcaaatgacaagaatacacagaggatgcttttataaagttcaaaattaacaaaactacaaaatagactattaggaatagatgtatctgcggtaaaactatatagaaaagaaaaagaatgactaatacataactgggaagtcacacagaggactgcagacactggtaatgtctgtggctgtatgtgttcattttatttttattatttgacacagagtctcgctctgtcacccagactggaatgtagtagcatgtgatctcagatcactgcaacctccacctcctgggctcaagagattctcaagcctcagccacccaagtagctgggattataggtgtgtgccaccatgcctggctaacttctgtatttttattagagatggggtttcaccatattggccaggctggtcttgaactcttggcctcaagtgatctgcctgtcttggcctcccaaagtgttgggattacagttgtgagccaccatgcccagcccattttatttttctttaaactgtaaatacacactttaatatataaatatatacacacatagtatttctttaatctatgactttttccccacaatgaagtataagcattttttaaaagacagtaaaagaatgttcaccctttgacaactgtgtgctaaacagctttcacctgcctctttgtcagttactccccatcaaaatgataacttaaacctaaattttctgactttgaggcctctatgctctttctgtaatcacaataaactgttaatgctatcccaaatttcattataagcaggccctacagactgcatttgaaaaatccacctgtaaactggtggcttgacattcaagggtgcctaatcattttcttccctggaagagtttcctgtccacagaagctatgaatatagaaggatatactgaggctggggtacaacctaaacagcatttctaagtcaatttcaaacacttctttgttataaaaaacagaaatcataaacatttcaacttccctagcattccaatatttaaaaacatttataacagtcacaactaaattcaaacttgatttttcttcttgcaatctaaatattttcttccatatttattagggtgagtttatataagttaaccataattcctctacttttaaaaagactttccaaataactactaagaaagcagtaccttcccaaccattttcctacatggtagacacaatgacaatgtttgtacagcaagatagagaaaacggaggaagcaaccagagaagaaaacagcctaggggctctggtgggcctaaggatgaaagggatcaagattgtggctaatttgtcatccactggtggtacgctggttgggaatccttgaaacagagtaatcctttaaggtttactctttcaacttttgtatttgtaattaactggctacttcattggcagtgtcctttatgcagtatttgaaagagtataccagagaaaaatgagttgtatattaaaaaaaaaaaaaacagggctgggcatggtggcttatgtctgtaatcctagcattttgagaggctgaggcaggcggatcacgaggtcaagagatagagaccaccctggccaacacggtgaaaccccgtctctactaaaaatacaaaaattagctgggcgtggtggtgcacacctgtagtcccagctactcgtgaggcagaggcagaggcaggagaactgcttgaacccgggaggtggaggttgcagtgagccgagatggcaccactgcactgcagcctgccgagatggcaccactgcactgcagcctgccgacagagcgagactcagtctcgaaaaaaaaaaaaagagagagaaaatatagaatgagggtaatagagaatcaaaataatattaacatttaggacttcaatagtcacatgtcagctaatgatggaacactttctgagaaatgtgtaggcattttattgttgtgcaaacattaaaatagagtatacttacataaacctagatggtgtgtagcttaccacacacctaggctaatgttaagacctttttatcattgtgtgaacatcgtaatagagtatacttatacaaacctagatgttatagcttattacacacctaggttacatggtatgacctattgctcctaggctacaaacctgtacagcatgttactatactgaatgctgtaggcaattgtaacacaatagtagtatttgtgtatctaaacataaaaaaggcaatgtgttgtgcaaaaatatgacagcactagttgataagaacttttcagctgcactataactcttatgggaccactgttgtgtatgcagtccactgttgactgaaatgtcgttatacagggtatgactgcattttccatagcttgccttataaagctctatttctattcttgtcagttctctgatgacagaatctacaaaaaatctgtgacagttcttctgtctcctagttttgtgatcttaagcaagtctatgcttcagtttttctctcctgcaaatggggtactaaccaccttgaagaacttaatgtagtattgtgtgtgaagcatctagaatagttcctgatacagcacaagcatccaataagtgcaaacttccccttcctccctcaaaggatatatatacacatatatatacatatacacatatatatacacatatatacatatatatacatatatacacatatatacacatatacacatatatatacatatatacacatatatatacacatatatatatacacatatatatgtgtgtgtatatatatatatatatgtgtgtgtgtatatatatatatatatatttttttttttttgagatggagtgttgctctgttccccaggctggagtgcagtggcgcgatcttggctcactgcaacctccactccgaggttcacgccattctgctgcctcagcctcctgagtagctgggactacaggcacccgccactaggccggctaattttttttgtattttttagtagagacagggtttcacgtgttagccaggatggtctcgatctcctgacctcgtgatccgcccacctcagcctcccaaagtgctgggattaaaggcgtgagccaccatgcccagcccctcaaaggctattttaaaatgtaattcttctggatcaaaattatgcatctaagaattaaatttttaaaattcccctgtttacagcaatgggatcctaaaataaaatatattttatgatgctctaagctgacaatgcttaggaaaagtctgattaagtcctacagagacagacttccaattattattatttttttttgagatggagtcttgctctgttgcccaggttggagtgcaacggcatgatctcagctcactgcaacctccacctcctgggttcaaccgattctcccacctcagtctcccgagtagcttggattacaggcacctgccatcatgcccggctaattttttttttttttttttttttttttgtatttttgtagcaacagggtttcaccatgttgtgatccacccaccttggcctcccaaagcactgggattacaggcgtgggccaccgcacctggcccagacttccaattattaggaaagcatataccttcaaagtgtatgcttcaatttactactaaagcacatcattccaaataccaacgggaactcagtggttacttatctttgggcatacacagggtcaggttttcaaggtcatgctaaataattttacagataaaagttttccacatcactgaatgggtagattgagcaaggatatgtcttttttattttttaatttttttgagatggagtcttgctctgtcacccaggctggagtatagtggcatgatctcggctcactgcaacctccacttgccgggttcaagagattctcctgcctcagcctcccaagtagctcggactacaggcacgagccaccatgcctggctaattttttgtatttttagtagagacggggtttcaccatgttggccagtctggtctctaacttctgacctcaggtgatctgcccaccttgtcctcccaaagtggtgggattacaggcatgagccaccatgcccggccgggtatatcttttgatagctcatttgattacagctatcccaccacccaccctcagtaaagattaaattgaggaaggaaagtaccctctcactcccacacaaaaccagcagattcagtttgcacagccaccagttaaagccataggagtttttactggcttcaccacagacctcaattccgaaaattaccattgcatattgcatacagtgagcaactgtctacaacagtctaactgaaaagacattgagaaaggctgcaaatctttcagaggacagaaaatggcaatatggtcccagagtgagattaaattttgtatcaaaccaaagatctacagagaagtacttatgccctatccaggctgggcccagtggctcacgcctgtaatcccagcactctggaaggccgaggtgggtggatcgcctgaagtcaggagttcgagaccagcctggctaacatggtgaaaccccatctctacaaaaaatataaaaattagttgggtgtggtgacgtgtgcctgtagtcccagctactcgggaggctgaggcaggagaattgcttgaacgcgggaggcagcggttgcagtgagccaagacagccccactgcactccagcctgggcgaaagagcgagactccctctcgaaagaaagaaagaaacaaacaaaaaagtaaagtacttacaccctatcctttacttggctccaaaacctgaacctatggtaggaatcagattatattttgtgtataattttatcagtatttctgagctttcaaaagctaaacaataaaaagttctccagttggcacaacaaattaatacaatcctttcaaaaagcagggcatggtggctcatgcctgcaattccagcgctttgggaggccaaggagggaggacagcttgaggccaggattttgaagccagcctgagcaatgtagtaagagcctggctctacaaacaataaaaaatgaactaggtagacatagtggcacacacctgtggccctagatgcctgggaggctgaggcaggaggatcgcttgagcccatgaatgagtcatgatcgaaccactgcatttcagcctgggcaacagaacaagaccttgtctcttaaaaagataaataaataaataacacctgagaagagacacgaagatgctatactcaaaaacgtatctgtgagaaaatgtaataaaaggttattatgttatccatttagcaaaactttatgaagaacctacagcataacatcagggcccaacttttcaattttgcaataatgaaactgatgaaagcaagtagtatgaatgagttctgtcaaaataacacacggaacatgtgcaacgaaaagtgacagcttactagccagacagttagaatacagatagaataatgaaggacaaccacaaatagaatagcgaaagttttgctttccagaccaaagaattcacaacttcaaacaaatcagcatagctgtgggctatgggaaaacaatacatgtgacaagttttcttttcttgagctcacttgtggcagattgcaagtttaaggcatagttataaaaagaaaaaaaaggtattaacagtatagtctagaaacggtggctacacatgcaaacagcgggaaggactgtattaacagaatcattctagatctttgcaaccagaggatcttgctgatttacatattttaactggaatcctgtgcagggatgtgggggggaaccagatcaattaacctgaaacttcataaggcattgcaattttagcactttctgaaactactagtagaaaaatatccttgctttttgagttaaatctttttaaaaagcttcttggaaagtctctttttaaaaattaaatcggctgggcgtggtggctcatgcctgtaatcccagcactttgggaggctgaggtgggtggatcacaaggtcaagagatcggccagccaacatggtgaaaccctgtctctacaaaaaatacaaaaattagctgggcgtagtggcccacgcctgtagtcccagctactcaggaggctgaggcaggagaaccacttgaacctacgaggcggaggttgcagtgagccaagatagcaccactgcactccagcccaggcgacagaagaatgtctcaaaataaataaataaaataaaataaaaataaaaataacaataaatcaatattattaagagagaaaacagtctatcaaataattcaagaagcactgagaaaattaccagcaatcacatggaggaaatgtattagcatcatttttagataactcttaagtgcttctcatttttattacacatttcaaacatgactccaatctttttgcacagtatgaagttatagcttattaccttacaaacgcctcatagtcaacctgttaactggatgattcaaggaaggagctcacgcttaggttttaaaattttagccacttaccagctgtgtgacttcgtacaagttacaagagtgcactgtgacctggtttcctccccaccaccaaaatctgaggcaaactacaaattcttttagcttatttttaagttcaggttttccatttaatgccctcttctatactcgattcaaaattttaaacatctggttattttaaaagttctggccaaaaaaaatttttctgaatatatttcaaataatgagcacattggcaataaatgaaaatggagccaaaactaaacagtgaacaggttttgagacatctaaaaattaaaatgcttgaaactgggctgcctaacaaaatgaatgcccaactaattcaaaaacatttttacttctaaataaaaagaatgaataatacaatggccacatatgcatgtcactgatgtctctgtttaagctactcagtggaacaactgaacagagaaatggagataaaataaatgtggcaggggaggacgaaggataaagaacagataccagaataaaaatgaaattacaactgtgaagagtggaggaggaaaaagcagaacaaaggaagagctacacccctactccatgcccaaggaataggagtcaaaaagggactcctcttgctgtgtgagacagtaagagaagtccttgccagcgtgagacagtaaggggcacctctagttttctggtttccatgtctccttcccaagagtaagtattctagaactctgtgtgctcctgccaagatatcccaatgacattcacatccctaccactatgaaagctttaagacgatcaaaactaatctcaaaatccctttattcatacttaaatctgccaccacatgaagtttacaatttccaaatcattccttctcccaaaacaatgccgaacatcctcaatgactaaagccgttctactcactagtcagttattagtcattaacaaaagcccccttacccatttatctgctaagtggagtttcactaaaacttagctctcttctgaggacactgcttcccctctatctcttttagcaggtgaatttttctctcccactgtccctgcgactcactgccaattcccatccactggctggccctcctccccagtgcctccactctgaatatcatattttcaggctatactagatagactacactcttccttattgtagatatcttttttgtaagcaaattcttccagaacctgatgtagatatctaatgaccacagatgctcttctcattttaattttagctcactgccactctttccaatactcctgtcataattcttggtgacttcagtatccacacagatgatcctctgaacgtacctttggcctcacagttcactgacctcctctcctatggttctacactctatcccatctcagaaattcactgccaggattgtaaacaggtcatgtgattacccaaagttgcaatcccaccacaatcttactttccaagcatcctactcttctaccaccagctgcaatcttttcattttaacccatttatgcctgaggttgcaattttttgaatttttgcaatcaaactttgagcagtaggatataaataacttccacatgcttagcattccaataatggaccactaggcataagttaatctctctagtagtctgagactaacaattcccttggtgtgaaagtggcaacgtgcttataatggaagcatgtcttagtttttggaagttacattttgaagtgcttttttttacgtgtcatggtgcttgcaactttctatcaaatattttagaaaaagagttgcctctacttactgtctctaattcttctcttcccattcttccttcaaaccatactactttcatcccccatcatcccacaaaaaccattcaatatcaccagtgagcttcacactgctaaatccaatggtcattctcagcctgtattttattgacccatattctcactgaaatgccttctttattggcaggctgaataccccgcaattctgaatttcctcctgcttctctgatagcctctccagctgctcggaatggtccaggctcatgtcctctacctctagatgttagagtgctccaaggatcagcttttgaacctttcttttttacctatattcactaccttgttgttcttattcactttcagagatttatacaatgaagattctctaatttatatctctaccagccctgtactcttaactgtataaccaactgattccttggcatgtctatttaggtatcaatgggcatcttgaacttaatgtatgaaaaaaaaaattcttgatgctcccttgcaaacatgttccatccacaagcttcattatctgaaaattactccaacagccatttgattgatctccccaatttggtccttgccccccactttaatctacttatctatagcagcaagaatgatcctgttaaatataaaagtcagatttgactgctcctgagctcaaaactctccagtggtttctcatctcagtcacagaaattcatgtctttataatggcctacaaggctttcatgtctggccccaaactacctctctgatctcagttacttctgtcctccactgtagtcatactgttctccttggattcctcaaacacaagagacaaagtatagcttcaaggatactcctatgctacttcctctgctcacacagtcttcctgggccaggctcactccctgacctctactttctttagttcctggtcaaatatgtttcttatatatctgtcatctgtttagtttctccttcaccggagtataagatctgtgagttcagggatttttatgttttgttcacacagtgtatagaataattcccggcacagagtaggtattcagtaagtatttgatggagtaaggaagagaagttggggttctgtagagtgctgagtagaaaaaagaccagctatccatttcactaatatctattaggccagagatagctaagaaaaacaggacttttaccataatcaaaaatttaagattataaacaaacatgccattatttatttctggatggaatttcatatatattgtttatattcagcttgcattatctacaaaaaatattatgtagattaactggactattaatacaggggaagttatataaagagttaaaactgattacacttcatttatacgtgtattagaaattcctcaacgaggtacatttcttgatgaaggcccaactggctaattatatgcatcaccttatctactccttagtaagttggcaggatacctttagcaacgcattgagataggaaatacaacttcacatacatcaaaataattaagtataactttctttaaaaattttataattcaacatttttacttatttataatcctaattaataaaattgtattattacatttccataggaactaaaatattgatagaaagagtagctcattccagttgttatgcccacaaacctgttatcagttcccttaatacttacccttaagaaattaaactcctcatgttactatactgtataacccaatgtaaaaaggtagaacgtttaaatagtctaaactagaatttcttctgaaaaatcaaaccaaaccacaataaatgttagtgattaagagtacttattttcctgaagaggttaatattttggagagtcaagccacagaaccaatgaatgatacggtataatctcatactgaccctccgtggtttactgaagcataacatcaaaaaagtcctgaggttcagggtaactgttacagaaaacacacatttcttaagacataaattcactgaaatacacgtcatgaaagtactttgtagtttataacgtttgtaagtatctctaagcaagaaagtggtattattagttccaatttccatatgaataaactgaggtacagaaagattgctcaatgatcttatatgtatagcacacagaaaaaccctttacacttgcatgtgcatgcgtgcatgtacataaggattcacagataacaatacctcattaggggccttcaaaatattacagtttaagacctttgaaactcatacattaaaatatcaattttcccctattcaattaaaagtaaaaaatatatacccaatgttgacgataattccgtgaaactgacactcttactgattgttgaaggtattataagctggtacaacacttccagaaagcaatttggcaataacttcaagacacaaaaagtattcatgccctttcttagtaactctatttctgggaaactatcctatgaaaataattcaaaatatggaaaaagctataggttatttataacatcccagatacttggcatctgggatttaacatttgaggttttgacactggtagttttaacagcttgtgagagaaccacaggttgatctacagcacatgtagagttgctgtgtgagcaaggaagtcacgtaactaactagtgagttaagcctgaatgctaggcatcagcttctcattgtggcctggttgttctctactagtcctgacatgcttggaaacatttctaggctgggagagatgaaaaacacacctctgttttaaaagtttttaaaattaaaaggccctaaaaaggcaagccaattacttggctgctcatgaaaatgaagaaatttaagaaaagcttgttatttgtgggtttgagatctgtcctatttttttttcaatgttataagtccactgtagtgaaagattagaaatctgattgcatattcaacaacagagaaatggtaaattaaactgtaatcttcttaaccagtggttgaattaggatagtggaattacagatgataatctttcattttacattttcacttcataaggtcaacattaccctaataccaaaaaccaatacgaggaatgaaaactacagatcatattcctctttgccacaagtacaaatatttttaataaaatattactaaattaagctgggaatatataaaaagataaggtaccatgaccaaggtggggtttatctgaggaaatataagcaatgcttataacttccagttacagataacaggtgtaaataccacttttaggtatttgccctacattactatgttttgtttgtttgtttgtttgagacagggtctcattctgttgcctaggctggagtgcagtggcatgatcacagctaactgcagcctcaacctccttgagctcaggtgatcctaccacctcagcctccccagtagctgggactacaggcgtgtgccaccatgcccagctaatttttgtatttttttgtagagatggaacagttttgccatgctactcgggctggtctcgaacatctgaggctcaagtaatccacccaccttggcctctgaaagtgttgggattacaggtgtgagcccctgtgcccggtttcataattatgttaataaagacacaatctagatgtggtccacttagtgtgggaacctgtatcatatatctgtaccttacaactggcattatatatttctgaaatatttgctataaaacacctcaatccagtttattttagatctgctttctcagacaactgaacacttcaatttaaaaatgttcatattaaaatatattcaataagctcattctaagattagaattaaactacaatatattcaacttaaaagacagaattcaacatttcttagaatcataaagtcaagggactcaagtaaaatatttcttaacagacatctctgagtagcataattatgtagccttatggtggagatttactgacacagagagctcaaccccttaaagcagccttcagttcttctgcgagacaattctaataatatagagaattcctctttatattattacgttaaaatctaccttccttcaacttttatccactggcagtactgctaacctgtgaggtaataaaagagattaagtcttcatttacatattctgcaagtatttaaaaatagctgttaaaatcactttttagacttttcctctccaggccaaatcaattgagttctcccaaccacttgtcatatgatacaccagtaaacttcattcgttcttaccaccacttcctgcaaaagccaaacatttaaaacaaatgggttgcaacacagcacttcattcctgtaggaatatgcagcagaccatcctagcaaatttactacaatagccagtgtccatcctagcaaatttactacaatagccagtcaatcctcaaatatcaaaataccctatttttttcccaaataaaaacccacgcaaacatatgttttattcccaatacaaaagcacgctacttataaaaatggaattggtaacagaacacctttaagttttaagcaatggtattcctacaactggttagtactctttctcctagtgactaatataggctaaagaactgaacccttatccaaaaatatatctggttttaaaagttatacacatatataatataaacagcagtaatctataaaaacagtattgactgcagaagtccctgatgatttgcccaacaatgttgaaaaaaatgtgtacagtagtcccccattatctgaggaggatacattccaggacccacagtgaatgtctgaaatcatggatagtactgaatcctatagctagtatgttttttcctatacatctacagctatgataaagtttaacttataaattaggcacagtaagagattaacaacaccaacaataaaacagaataattacactgtaataaaagttatatgaatataatctctcttcctctttctctttcaaagtatcttattgtactatactgggtaacaaactgcagaaagtgaaaccatgaaaaaggggcaactgctgtttactacagaatgatcccatttatcccagcttttatctttgtttagctttgacatgattttaattagttttgtactagtactattttactctactatgctatatttctttgactattcgcagcaagattgaaaatcgaagactatgtaatacatattttgtgttagtgaaacctcatgaattaaggactagtgggggttatggaagaaaaggtcacttaagaattaaacattcaaaagaagtgtaataactttagaacacgtggtgcctggattcaagtttctatatcttgagaatacaggctcaaacctaggaaaagctactctgataaatggacaggaaaaatttatagttagtaaatcaaagaaaccaattaaaaataagttggtaagagtctaaaatgctagtcattaagttagttaaatggtgtatgcaaatatgatgttaaggtcctcaccaaaacatttccggctccttcatatttaaaaggtactcaacatgctgaaattcgaaaaagagaaaacatttagtatctaattcttacctggaacccatttaatttccatttccatatcattttctttgcctttcttttctttttcttgaataacctgcaagagctgcctgtatttagcaatttgttcttcatcatccttctgacttttctttgttttcccatcttcttctacattgactccatcatcacctaatgaaaaaaaaattcacttaatacacagaaacaattcatttctaactcgtgttcagatcttatggtcactctcttttaaaagatgctgttagaccacaggatatcaaaatcagacttaaatttctgaatattaaatgaaagacttagggtctcatgtagaataaaaatcagttgcaatataaatttgcactgtcatagcagtatgcttgggaatgcccctttttattaaaatttatattggataataattctgcagttacataacatctttgggcttctttttcctataagctgcaagataatgaagatggcattttcaccctctctgggaagtgaggagcgtctctgcctggccgcccatcgtctgggatgtgaggagcccctctgcctggctgcccagtctggaaagtgaggagcgtctctgcccggccgtcatcctatctaggaagtgaggagcgcctcttcccggccgccatcccatctaggaagtgaggagcatctctgcccggccgcccatcgtctgagatgtggggagcgcctctgccctgccgccccgtctggggtgtgaggagcgcctctgcccggccgcgaccccgtctgggaggtgaggagcgtctctgcccggccgccccatctgagaagtgaggagaccctccacccggcagccaccccgtctgagaagtgaggagcccctccgcccggcagccgccccatctgggaagtgaggagcccctccgcccggcagccaccccgtctgggaagtgaggagcgtctccgcccggcagccgccctgtccgggagggaggcggggggtcagcccctgccaggccagccgccccgtctgggagggaggcggggggtcagcccccaccggccagccgccccgtccgggagggaggtgggggggtcagcccccgcccggccagccaccccgtctgggaggtgaggggtgcctctgcccggccgcccctactgggaagtgaggagcccctcttccccggccaccaccccgtctgggaggtgtacccaacagctcattgagaatgggccatgatgacaatggcggttttgtggaatagaaaagggggaaaggtggggaaaagactgagaaatcggatggttgctgtgtctgtgtagaaagaagtagacatgggagacttttcattttgttctgtactaagaaaaattcttctgccttgggatcctgttgatctatgaccttacccccaaccctgtgctctctgaaacatgtgctgtgtccactcagggttaaatggattaaaggcggtgtaagatgtgctttgttaaacagatgcttgaaggcaacatgctcattaagagtcatcaccactccctaatctcaagtacccagggacacaaacactgcggaaggccgcagggtcctctgcctaggaaaaccagagatctttgttcacttgtttatctgctgaccttccctccactattgtcctatgaccctgccaaatccccctctgcgagaaacacccaagaatgatcaattaaaaaaaaataaataaaataaaaatacaaaaaattaaaaaaaaaaaaaaagaagatggcattttatccctctttatgtcctccactatccagcacagtggctttaaaatgttatgctgaataaatgtaggctgaatattgttgggatgaattcggtttgcagctattcagcctgaagagaagagataaaggcagttgtttataatccaaacctaagaatactggaacctttccatttttgagcaagcatgcttactccaacgatctcattaatatattaagaataaaaatgaattaggagttacttcaattaatttcactgtgtggaaaaacattcacatctgcatttcctagttctgcaaaaataattaaaatacaaagaaacattataaaattcacaggcaacaaatacccaagaaaactaatacaccaaaaagtttgttctacatttccactgcaagtctccaaatcaaaaacaaatcagaaacctgggttttaatgcaaaacatacagacttattgaattgactgtctcaagtaaaggaaactctactagcaggataatgaagtccctctcctctataacctatggctaactgctcaccaaaaatgtctgacattattaagcatttagctgggaaacatcagtgttaacagattgtccttgtatcttttttagtttttaaaattcattttgtccttgtatcttttttaatttttaaaattcatttattttttcttttttcagcaagtccttatatcatcaatgtccttatatcttaaaaaagtgatatggaaaaaaactggttaagtaaatatttctatatgtatatattgttttcttaaaataaataaaaaatggtccaggacattctttccatcctatcacacttttattttcattcaaacagctgaaattcatttttttcctgtttgtgctttgtgccacaataataatgttggatggaattctgtcatgtatcccgtaattcaatggataaaacatcaggaacacattaacaaatggcaaagtatttctttctattaaaagcttacttctgaaaacataattagaagcaagctccttccaggttgaaattttagtggtaagtctctgatggcttactttaaactgattttttccagtactgaaattttacaatctgaagctctaaaatgtgggataagtcatgtagctctgttttttcccaattcaaggacactagtttgtgaaacccttaatactatataaggagtgaaagaataataattctaacagtaagccaccctgctatgctctcttataaacaataaccagaaatattcagtagctttaaggcatttgaatatgctgatgtatctatgagaggtactaaattagattatagtaaatttgtaatcaattaaaatgtggaagaaaaatatacgctttaaaaaaacttggtgtatctcaaacaaaaagtcattatttattaaagttttttttttttttttttttttttgagacagagtctcactctgttgcccaggctggagtgcagtggcacgatctcggctcactgcaagctctgcctcccgggttcatgccattctcctgcctcagcctccagagtagctgggactacaggcgcccgccactacgcccggctaatttttttgtgtttttagtagagacggggtttcaccgtgttagccaggatggtcttgatctcccgacctcatgatctgcctgcctcagcctcccaaagtgctgggattacaggcgtgagctgccgtgcccggcctatttattaaagttttaagaaataaaaatacaagatacaaggtacatcatttcagtatttccaaccataagcctggtattattagatcctcatttcacagctatggaagaaagatatagggggtttagtaaacctaatctatgtatggtgaagttaggatttgaaactagcagagcccaagctcttaacaagaatgtattaacaaattaatgcttatttattcacaatattagctaccctaatgccaaaaaatgtcattttaaaatttagttcagttctcccaaaacagaaatctatttgaacaacttgtatccaatcttcacaagtgtacataaaaagttatcttttttcctttatcttacagctgatagtgaagaaacactatccagaattttcagaaaagttctaaatgcccatataggcatacaaataaaaaagaaatactgataaatcattacgtctttctccacatgtgtgaggggaaaagacacagatagaggaaaattgaaaaaaggactcagctgttctgtgaacaataaaaaataaaatggtcatctagttatttggaatgccaaaagaattaacaagcatcagccactaaggcctttaaaaaaatgtgaggccctttgcacccaacttaactcccattgcaaatacacattttcaaagagtattaaatacttaagcaattatgtggttgtattaatatgagatgtctgaacaaagaaaccagaatgattaaacatgattttccatactgttaaggagtagtattttatgaaaagcttagaaaaatgaagcagtgtcttcaggagtctaaaagaaacaatgataggccaatcatgggatctcgaaaactcaaaagttaaatggcattatggtcatactaaagaagcattttaggatttaattaatttgacatttaggctataaaaataatacatatacaaaaagaaaacaaagctatgaaaaatgttaagctacaaattaaagaatattcattcttgctaatttaaaatacttttatctatgtttaacatttatgggttcttcactttctgtcagcattaaatctcttactcataatttttcatgattggcaattctattagataagaagaatgaagatgtgaaggtattaggcagacagtatcaaccaaaagttgacatgaaattacaacccggcaaccagtttccaaacagagacagatcaaatacagggaaaaagggttttggggctttatgtctacaaagtgagctattttaagcaaagagcatatacatttaaaagtacagctgattcttcaacaacatggaggttagaggcaccaaccctaggcacagtcgaaaatccacacgtatctcgattctcccaaaacttaactaatagtctactgtgcagtggaagccttacaaataatacagtcagttaacacatattttgtatgttatatgtattatacactgtattcttataataaactagagaaaataaaacgttactaagaaaatcacaaggaagataaatatatttcccacgcattacatggaagtggatcactgtaaaggtctccatcctcattgtcatcatcacactgggtaggctgaggaggagcaggaagaggggttggccttatagtttcaggggtggcaaacgcagaagaaaacccatgtataagtgacctcacacagttcaaacccgtgttgttcaagagtcatcaagagtcaactgtacgccgttaatcatttcaaacattaaaaaaaaaaaaacaaaaacaaaggccaggcacagaggctcacgcctataatcccagcactctgggaagctgaggcaggtggatcacttgaggtcaggagttcgagaccagcctggccaacatggtgaaaccccatctctactaaaaacacaaaaattacccgggcatggtggtgggcacccgcagtcccagctacttgggaggctgagccatgagaatcgtttgaacccaggaggaagaggttacagtgagcccagattgtaccactacactccagcctgggtgacagagcagtactccatctcaaaaaacaaaaacaacttgaataaagataaagataatttgaggaacttcttaacagcaagctaggtacttcagactaaccctttcactgaagatattaagttggaattaagttggattaaatattattttataaagcttcaaagaggttaagaaaagaaagaaaagtttcaaagaactgtcaagttagagaagacttactatttcaaaaccaagaagggaatattagagggatgactccagggtaaagacctgttttgctctgagatcatttcctgtttcctgatccacagaacaaagagctatgaaagtcaattgtggttttagcaggctttcaggaccaagaagacaaaagttaaagaccaaaaaaaagagggaatttcaattagtaccctgacattaagcagccacccagagggatatactcccagggaaatggtcaatctgaagtaaaccagccctcatgcagactttaatcatctgcagaagccagggaacctaagccttaacatttggagaaatgtggttctaaaccaaccaaagtaaattaaagtcttctctgatcaaagataccctaacttcaaatgtcaaagtaacacacaaaattaactaggcacacaaataaacaagagagaaataccttgtaaaataagacaccaacctgaaaatacatgaaatattaaaacagagactatgagtaaaaaatataaaaagtggtatttctgacttgagaaatagccaaatacaacctccataagtaaaaaatataataaccaagattaagactgaatggagaggtctatcagcagatttaacactgctgaaaagacaattagtgatctggaagataggtcagaagaaaatatccagaatgcagtacagagacaacagattaaaaatttaagagtagagataggcaagatataatgacgagatctaacatgtatttagctgatgtcctaaaaggataaagaaaaaacatctgaaaacataatggctaagaatattccaaaactgatgaaagataccactccacaaataaatggaacccaacaacaaacctcaagctccacaaacaaaaagaaatctactcttatacttaccatagtaaaactgcagaaagacaaaaagaaacagaaaactctaaaagcagtcaaaggaataattacagaaacagggagtctactttttaactagttgaaaaaatggaacgtaaaaatatttaatcaatctaaatgatgctcttattttttaaaaaggcaaatgaggggagatgcctaaaagattgttttactggtttactaagaaactgagtgaccatatgcattaggacaagtctagaaggccatgcttggttaggtcagggttttaaacaaaatatttatagttaaagaaattcaggcaaagaaaatttttttttaaaaaaatcaatcactatctacaggtatatataatactgtgcatgtgagcatatctgcagacagaatttggctttccctgtaaagctactgccaaagacctatgtccattaatggtcactgaaagattaacaataccttgtagctcctcttctatctcctcttcatcttcactagaggaagctaagtaggcttgaaaatccatgtccaaaagctcttcctttttaaacttcctgttgagcattgtaattctttcatgatcagtctcatcccaagtgatttccacctttcaccaacaaataagaaaaaataacacacgaaaatggaaatgtcagctcaaacttgttaaagaatatatactattaacctggatgtttaacagtaagttaaaagttaagacacattaaaacaaatacatgaatgatatgattaataaatagtatcctatttgtgaaaatggaaccatttctattaacttgtacctcctcccaattctctgctatctacaggatactccatcactgacagtaaaaattaaccagtgtctaaattaattacggtgcaaaaaaactaagaaaatgtactggtaaaagagttaacattatgggccaggcatggtggctcacacttgtaatcccaacactttgggaggccaaggcgggtggatcacctgaggtcaggagttcaagaccagcctggccaacatggtaaaaccccatctctacatgaaaaattagctgggcgtggtagcaggtgcctgtaaccccagctacttgggaggctgaggcagcagaatcaggaggcctgtaatcccagctactcaggaggcagaggttgctgagatcatgccattgcactccagcctgggcaacaagagcaaaactctatctcaaaaaaaaaaaaaaaagttaacattatgaatcagtgaaaacatgttttttcacctggagttctaagatttcaggaaatctgcaaactatatgaaatctgttgctaaaacaagacaatctcagtggggtccattttaaaaaaagattaagaaccactgatgagaaaagcatctattagttggaagtagtttaaacctccatgatacatgaattcatctatgacatgactgatgtggtgatgactggctcctgccctgtacatagcccctattctcatataaggccctgccagatattttatcttcatcatagggtagatccacatccattttaagagatccttaaaatcactgccacctgtctcagaaattccagctagtcagaggattcagaaatgatccctattctgacaattaagcctgagctgataaccaccaaaacactgttggaactaggacagatgttgatgatacagccaggacccaggaactttagactggctggctggacaggctggccctgatcattatgttggttctgaaaataacatgactttaatttcatgtgactgaattttttagactttgcttactatgtaatggtagagttttactacacccagtaactaatcaatgccatacagtgcccaccacggcatagcaggtggcagatacagctactctctctgctaccagtccctcctcagagaagcacggtgatttatcacacaggaaaagcagagggaagctagtgtggctactgcagagtacagctgtggacagaaaggttattgggagaaagaaaaaggagaagggaggccaaggcgggtggatcaccagaggttgggagttcgagatcggcctgactaacatggtgaaaccccgtctgtactaaatatacaaaattagctgggcatggtggcgtgcccctgtaatcccagctactcaggaggctgaggcaggagaatcacttgaacctgggaggcagaggttgcagtgagccaggattgcaccaccgtactccagcctaggcgacagagtgagactcagtctccaaaaaaagcaaaaaaaaagaaaagggagaaggggccaggcgcagtggctcacacctataataccagcactttgggaggcagaggggggcggatcatctgagctcaggagttcaagaccagcctggccaacatggtgaaacccagtctctactaaaaatacaaaaattagctgggtgtggtggcacacacctgtaatcccagctaccggggaggctgtggcagaagaatcacttgaacccagaaggcagaggttgcagtgagcagagatcgcgccactgcactccagcctgggcgacagagcaagactctagtctcaaaaaaaaaaaaaaaagaaagaaaggaaaagggagaaggtagtcacctaagtaataaactatttcaatagacaaaaaccttttggctatttgttactaagcattaatgtgacatctattataccttaattattccatatcaattctttttacagttttgaatcatctgcagaaaaaggtactcctattttaaattttcactagttttgtttaactgtgctgggaggtaattcattatccacttccccttattccctaggatattaataactgatgtattagagtgtataggagatactcttattttaaattttccctagtttcatttaactgtgcggggaggtaatttattatccacttccccttattccttaggatattaataactgatttattagagtgtataggaaagacagaagagtgtataggagagacagaagagtgtacaggaaagacagaagagaaaaaagaaacatcagcagataactgacacaggcttaaatgcgtaacaagaatctgaaaacaggttcacagatatggtagaggcagacacgcttgtgtctcatttctctctgtacccatgcattaaaaattttgaatactttgaggctgggagcagtggctcacgaaacctgtaatcccagcactttgggaagccaaggcggcctcacttgaggtcaggagttcaagaccagcctggtcaacatagcgaaacactgtccctagtaaaaatacaaaaattagccaggtgtagtggtacacacctgtaatcccagctacttgggcagctgaggcacgagaatcgcttcaacctgtgaggcagaggttacagtgaactgagatcataccactgcactccagcctgggtgagagagcgagactctgtctcaagaaaaaataataacaaaaaaattaatactttccatttttaaagatgctataagtaatatacaaaatctcttcataaagcaatagagtccagctacatattttttaaagtaaagaaataccgttgatgttcccattgcagcagaagtgaaatattttggtttatatgctgttaaattcacttctgaggctacatccttaggctcatcatcaaaagtaatatcatctggtataaacctaagaagtaaagaaaaaaaatttatttaaaatacgctgcagtgataaccacagtttagattctcatctaattagttgtagtttatacatacacaaactttctaaaagacacacgtttaagagacaatgttagacataacctttgtatatttctgaatgaattcatctttgtataaatttctgaaattcataagctataactctgtaattccactaaatttaaaagaatgctgtatagatagaaatcgtgcattaggagtcagttaatgagtcaggtgcaagcacatgtgggtccctcacgtttcaaaaagatccagacttctgatagtgcagtcattgactacatgattttgttgttgtttttacagagagggtcttgctccatcacccaggttggaggtccatggcataatcatggctcactgaagtctcaacggcctgggctcaagcgatcctctacaggtgtgcgccaacatgcctggctaatttttacttttaaaattttttgtagagacagggtctcactatgttgcccaggctggtcttgaactcctgggttcaagcgatcttcctgcctaggcctcccaaagtgctgggattataggcgtgagctactatgcccagctggctatattgtattttgaagatcaaatataattattaatgggtaagcattgtgaatacaaagtatcatatacatgaggtgtcactgaaaacaagggaaagcttaaggttgagtcttacaatttcctaattgtacatttagccatttacatttagagcagtgttgtccaacagaactttctgtgacaagggcaatgttctatatctgctctgtccaaaatggaacaattatttgaaatatgactacgcaactgacttataaattttaactaaaataaccaaatatgactagtggctactatactggatagcatggatctagagataacaatctgttttcaaattcctctgccccttcctccatgcatttttaaaagttaacttcatctggttcctagctctaaaagcagttgcaaggaaatattattgtgtaaggtacaccatcttaaaaacagagccaatatgtctgaaaggacaaagatgtggggatgattcatacataatactttagcactgtcttgtttgttttctttcttaggagtgatgttccatgggatagagttaaccgaaaagcaaaaaaatcattttagaatataaaacagagatcactaccagttcaaatattttacttcttataatcatgttgtactaaaagattaaattggtaatacatacactggattaccttagatctatgaaagaacaactactttcaaattccaggccatcacaatcctcataaattttactagctgtttccggagaatcacagtctactactgcataatagtacttcagtcgtttgaattgataatctctcaatttttctctagacgtcctaaagtgggaaaaacttattaagcatacttatacagaaacacaaaaatttccctttaaaaaataaatgtaattctttcaagaaaaacatattacaagctggccttcataccaaaccatctttccttcatgactttgcctttataaacattaaatacttaagctcaacttattattctcacaaggtacagatatttggattggaatttggtatctaggaaaggagtgtgtgggaattcgtgtgtttatctataatttaactcacagaatagttactttgctattacacactgccttctcaagtaaaaccaataaagataattctattataaaatatgctagaaaaccattagctaaaagacattcctgatcttgcaaaatgtttgcttaagagtctataagtttgattttgcttaactacaacacattcttttttttttttttttttttaaggttccacacaaagcactgatacaactctttctttgaaggtcttcatctgctctctcctgtcactaatctatttaaccctcatttttattaagtgcaaatatagctccacctagtggcttaaaaactatcttaaattattttctatattgcaccatgatgataaaaaaaaaagttttatcattctttcacttttctatttgattctcaaataagaaaaaattatataatttgaaggcaaacagagcttcaatgatgtctcaaaaaaaaaagcaaaacgtactaattcagagcaacgaggctgaaagaattcaaaagaactccaaatcagtttaatcatgaaatgtttttcaaaaactgcaataattactttcatgaatacagaaatagaaatatacacgaacaaaaatcttcttggaataatgtaccacttttaacagactttaaatctgttttgcaacctgttttaaccacgaatggcacaagtataaactttagttttaactattaaggtgaccagaattctgaactaatgacatgaatttatgaggtttagttttatgttctatagtgatttaataccagtctttttctggggcatcttcaggaatacttaatagctctactggtccttgaacttgctcttccttcatcctctcctttccaaattctgaaggatatatctaaacagaaaaaaataggatcaatgtaatttgtacattcctttacacaaatatctagacctgtcgaagtcaggaactctaaaagtcacaacttgactcaatgaaaacagtaagggtgactcacttccaaatccactataggaagctagagcatcttgagaaattttatttaaaaatagatcactttggctagagactaacaagatacgaggcttggaaacaaaaataagagtatctcctccacataccacctgggacaagatggttccgagatccaaacgaaaaattaaaagcaaaacaagatgctaagctcaaggaaatgtgaataaaaacacacacatgaaaaatgactgaattagtttacatgaaatacagaaaaataaacatataatgaagatcaattttgtaataaccaacttatctctgtcataccatttatccagtgctttcttttaaagaaatagaacagaactgacgacaaccttatacagattaggtatagtctcgatataagaaaaagaattcactctcaccaggtgtggtatcttctaaaatcttgcctactttaagagtcaagaaataattgtattaatgacattgttttgatactactaggcttaatatacatttgttaatgaacacatgcttttttaaactgtctgaaatatgcaatttatcaacaagatgatccaagtttttcttactaacttgaatagtatatacacaataggtttaatatgtaagtttataatatatatgtagtcacatcttttgattcttttttttcctcttttctaagtctagaaattctcactattgcctaaaacacagggtttttaaattgtttctttggcttgacttttaatttttttttcctttgcttcatctagaatttcgctggagctattaggaggtgaagatctgaaccaagttctctatccaatgacctgttcatttgtccaaatattcaagcagcctattttgatctaagttatcatatgaactctttctatctattctgttctaccaatttgtcccatttttacccaaacctgtcaacccccatagcatcatgaaatgtttagatattgtaacttgtagggtgagtttttacacttgatcttagccaaaaggccgagaagcgacagggtgagtttttatattagcatgatttctcaaaagtttattagctagtctaggccaggcgcggtggctcacacctgtaatcccagcactttgggaggccgaggcgggcggatcatgaggtcaggagatcgagaccatcctggctaacacagtgaaaacccgtctctactaaaaatacaaaaaattagccgggcgtggtggtgggcgcctgtagtcccagctactcaggaggctgaggcaggagaatggcgtgaacccgggaggcggagcttgcagtgagccgagattgcgccactgcactccagcctgggcgacagagcgagactccatctcaaaaaaaaaaaaatagtttattagctactcttaatttgtttattcttttagatgattattggtatcctttttcttaactttgacttgaactgggattttgatcaaaattaccctagaacagtagacataacatctttaaatatttaaacagaataatacaggttgagcatcccaaatcccaaatccaaaattccaaactttttgactgtcaacgtgaggttcaaaggaaacgctcattggcgcatttcagattttggaattgcgatgctcatccagtaagtatatataatgcaattttatttcaaaatctgaaattctaaacacttctgatcccaagcattttggataagggagactcaatctctaataatgattgagggcagggctatttcaggcactgcactaaatacttagttcaagctcctttatacttaatccttacaatcaccaatactattgttatatccatttggatatattggaaagatgtaaacatacttgagagattaattaagtgtccaggatcacataacacttacgagaatcaagatttgaacccaggtctgcaataatgcaaagcctggattcttaattattaggttggcttgaaatatggtatcctcaaaatttatgtaagtttttcaaatttatcaagtgttacagtttacttcacataggtcatttgtgtttattaaggtaatttccaagaactttatgtggttttgtttctagtataattagattttttccttaattggccagtgttagcaataaggaatgcaatttattgttaaaaacacttcttatatgctgtccctttactgagcttttatttctttggatttttaatgtgtaaacaatcatataacctatcaataataataatttcacctcttcctttctaacatttatacctgttacataagtttcacactcaattggattggacaacttccacagtattttcctaaaaaggaaaactatggccaaaaaaaaaaaaaaaaatcagatttaacttaaaatgcctagaaatatttatttcaaaatgaaatcaattctcaccttgacggaaaatattacacctcctttgggtttaaatgaattgaacagagccagcaaatcttttgcctttaatctatcccagtccatgttacaaactgctaatcgacgtgtaatctgagaaatgagaagaattaaatagtacataatccatatcattctcaatacttgaaaaataaagattctaaaaatgtaatgccttctgtcccctatgctctgaaattaatagtacaggagttatctaagcgtaattcagtatataaaagagaacttcaaatgagccaaacaatagtaaaaccataacaggtaagtactttctcttacttggttcttaattcttaaatcagaacatgatcatgagctgattttttaaccaccaagtttgttcagctattttgccatgcatgcatgagtaaggaagttgagtatgttaccctgcaacatttcttttgggtgccgtacaaacagaaatacaaactactagctaaaacaagtattaaaaatttcatgcaacttttaattatttatgtagagcctcttcttatctgcttggacgtcttctagttcatataattatattccatatcaaattttaatcagaatcataaagaatactattaccaataagcttttcccacttaatgacatcagttctaccagccataaaagctgcttgtactgtgtttttcacaaataatcttgtttattcaaaaggttacctcatcagcacgaggagcatctttatctaattctctccaagcatgctcaaaaccagattcttctggaaacaaatctgccgtatcatcttcatcttcagaactagtttctatatttcctttaccccttgcaagatcagggccactgtcacttttatcatcatcctcactatcctcatcttcatcctcctcttcatcttcatcctcctcttcatcatcttcacttccatcgtcatcacctgaagctctaccaacacttgtaatttcattttcagattcctcatcacttcctatttcactaacgctttctgaatcttcctccagagcatctttgtcacacatttcaccatctgttgagttttcataaccatcactgtctcttgtcattatgagttgaaccactgcaaaatgttaaaggggaaagaaattaagaaaagatatatgctgaattaaactgaatccaaattatcttgacatcaactccagtaaaaatataatttctatgaaacacagtaaagacaaatatatattcagtaaatgcttagtcaatttttatgatagaaatcctaaccataacttctatgaaacagagtaaaggaaaatacacttaaccaagttatttaatggaaatcctaacacatgctcacatcacgcaagtagatccagacattcattcaatacttaacagtgtgcctgctacgtgctaagtgctcaatatacaacagttggtaaaagagaagcaaacagtgctctcagtgaaacttctagctgagtgaaaagaatacatggatatcaaataaaatcaatatataggaaaagttaaaatcacaactaagatatcccagaaagaatgttttctaaggggatttaatggggtccctaagtgagtgataactgagctgttacttgaaggatgaacaggagttaaatagtcaaagttagactaatagatggaaatttgtttgaaagagcaaggaaggtacctgtaaaaatctgccaataggaaaaagccaaccatcatgtccagatcacagatagcacagaatcaagtaacaaatggaaatgaagagttaagtagaggccaagctatcaaaaaaccatatagagagcttggactttttcataaaagcaatgggaagacactgctgttttcaaaaaagaggatgtcatcttcttttggatattgtcatcctcagacttgcatattgaggagatcaccttgactatactgtagaaaactgacttgggaaagtaaagaacagatgtgaatatagtaaaggtagtacagtacaaaaagcaagaaatgaaggtagcactaagttgggtggcagtatgtatgcagagatgtacatggatttcagagtcagtcaggaagtgaaaccaataattaccgactggagatttgacacggggactgggagttttggaagtgtcaaagatgagtcatagcttcttagctttcagagctagttagctaagaagatggaaagatgaaaagggaacactggaaatgaactagtttgtttggtggagggaaatcatgagttcagttttgaatatgttgaatacgaagtgccactcagtcatctaaaagaaagtatcaataataagagtgtacagctcagagaagtctgggttggagatcagtgactcattcatacgcagttgacaacagaagctgtgatgtggatgagatcacctataaagacagagaaataatatttatactttttctgccaggtcttgaactttgtaatcaactgtcatgattagcaatacaccaagattgaaagactgtttttgcttaagatggaaattttagtcctcacaactctgaaagggctcatttcctacttctaaagcaatcacaggcttctatctacttggtgtgtagatatatcttacgtgttttactcatctttaagttggagcttattttctgcttacaggctctaagtttggaaaattaaaagcaaatttaaaagttcaagatttagaatgaaattggaactaattttctcttggtcctataatcttataatagttattcactgaccaaatatttactgagtatctactacatacaaagaattgagctaggataagggaaaagagagaagatttgtaacacgatctcatgctcttgatggattcataaataaaaggtaaccatttactgatttataaatctatgttctcaatcaccatacagtgagagacatctaaatttgcctgcagagaggtatttataaaaaggcttcacaaagatacaacttgacttgagactaactgaatgaaaaggcatcttgttagaaggaaaagcaggaaatgggcttttatgttaccaccacaacgaagcagggattaataaaaataactagccaatagaagtgaaaagcgccaaaatgaaagcattgtcacaggttctatatatgagatctgaaaaacacaacattgaaagttactatgaggtaagcagaatttacttttaagcaacaagcttagaaataacatcttacagacccagtctatctagtattgcaatatttctcaactgtcagtcattataccattttcatgatttttgaatatcatttttttattaaattgaattttttaaaagttagttttgctctaaacaatattcctaaagtcacagaagtgatagggtaattacattgttttctaagatgttgacacagtacataactattaatattttagaagtttgagtatcatcaaaaatcttctcacttatgacaatggtacacataccacactttgggttatataataataaagtgttgcataagagacttaaagaggtcttccatttcaatgtttttaacaatatcaactgcattcagagtatttattcattcaataagtatctgcagccgagcacagctgctcacgcctgtaatcccatcatattaggaggccaagatgggaggatcttgagcccaggagtttgagacaagcctgggcaacatggcaaaactctttgtctctacaaaaatacaaaaattagctaggcatggtggggtgcacctgtggtcccagtgactcggaaggctgaggtgggagaatcacctgggcccaggaagttgcggctgcagtgagctgtgattgcaccactgcactccagcctgggcagcagagcgagaccctgtctccaaaaataaaaataaaaaaccccaaaaagtatctgcttagagcccacaatgtacacagccttgtgcaagataatgtggggttacacaaatataaatgtctctattcctagacagtattgctctagtagtgactgtaaacattactacttatccagctacttcaaacaaaaaacaaaaaaaaaccaaaaaaactgctttaccattttcccccaattataaacataatgaatgatcattacaaaccaaaaaaagttaggaaaatatggttaataaataaaacaaaggtgactagcagtaatttttcattcaaagataactggttattttagtatacaaccatatccctaaatttcttttctttaatttaaatactaatttgtttaaaataactggtcatatcgttattttggaacctatttttaaaacttcatagatcacagatgtttgcatatatttaattaatctcttaatgatttgttaccattttaatttctattttcattttttgagacaaggtcttgctctgttgcccaggctggagtgcagtggcacgatcttggctcactgcaacctctacctcctgggttcaagtgattctcgtgcctcagcctcccaagtagctgggattacaggtgtgcaccactatgcccagctaatttttgtatttttagtagagaccgggttttgccatgttggctaggctggtctcaaactcctgacctcaagcaatccacccgcctcggtctcccaaagtgctgggattataaaggtgagccactgtgcccagccagttaccgttttattttaaaaataatgctgcaatgcacattctttgcacacatccaattatttatgtaaaatagattctgaggagtgcaagtgctgggcatgaacatttcatgatgacaaatatcacactgcaagtcctcacatcacctttacttcacagcacttaaaaaggcccttgcacacagtaattgctgtaataactgatgaatggataatgaacagaagattatatatggagccgtgtaatccttatttatgagtaatgcctttcctagactgtggaaccaacaaaattactgcaagcaatgtggtggggtagaaggagtcagaagacttgagttgcagttccaggtctgcatgtccttacataagtcactttaatcttgttcgctgatacagtcttattgctcaaggtaactaagaaaattaaatgagaaaagatatgtaaaaaagtctgtaaaatcaatctaaaggattatatagctatgttatattaattcagtgccccaaatgaagtggatgctagactaacttacctcactaattcagtgtcaaatcaactttgctgccggtcccactccaatcttattcttcaattttagtaaccggattcctatcctttcttcccacacctcaagaggtctgctgcctggttccactacaaatgtaaaatgggataccaccactgactccctagtccttgctatccagaattcactccactgcctgataccttctaccctcacagtgtgatctctgcttatcaagacctcttggcctatcaaaacctcttggcctatcaagaactcttgggctatcaagacctcttggcctatcaagacctctcggcctatcaagacccctccttggatcctgtaatcacaggtctggctcatgtgaactactactggttttcagttacatcttcaactatcagcaacatcaacactcaaaattgcttgctgctggaggtgacaaaaaattttaattagtaaacacgtaatgcaaactagagccagctgtctctcacctagttccaaacaatcatttctcgctgctactcattttggcccttcaagaccttattatctaatcaaacgggactactgacctcttctgaacatgcccaatcacatctttgctcaaaaagttctttccatgtagcacactctggtcctcaaacttaaatttttccacaccccaaagtagtgcgtcccctatgaatttttctgattaccacatcttgagtgacttcttcctccagatttccatggctttctgctaaacatcttttacggcacttactattattgcattttgtattatggttctgactttcttctactttagatctatattgtccaatatggtagccagtagtcacatgtggtaacggagcacttgaaatgcgttttgtctaacttgacattaatatgaaaatagtattagtatgaaatgagtagaaaatgggatgtaaaatatacattgacttttatattgattacatattgaaataattttgatatattgggttacataaaatatattatttaaaataattttacctgtttcatcttactttttaatgtggttactagaaaatccaaaattatgtatttctactagacaatgttgctttagacaggggccactgcacaaagtttagcaggctgttatccgcacaggggcatttataaaaggacaagaagggctaaaatcaaggccatcctacactcaccaagccatgcactctggagggggctgtgtctgctcaggggcaaaaaatctgttgcttcaaaggcgccatctcttcaccaaagtgtgacccctgggagctctgtgtgtccagagagcatgcctttttctaatttgcataaaggcatcatataagctagcgacagccctgagatgggtgacgacgccttactcatattctgcctgccacatactagtggcaaagcaactgaacaaattaatgaatgagtactcaactctacttaccctcttattttatttttgagacggagtcctacttaccctatttattttattttacttttgagacagagtctcgctctgtcagccagtctggagtgcagtggtgcaatctcagcttattgcaacctccacctcccaggttcaagcaattctcctgcctcagcctcccgaatagctgggactacaggtgtgcgccaccatgcctggctatttttttttatttttagtagagatggggtttcaccatgttggccaggctggtcttgaactcctgacctcaagtgatctgcccgccttggcctgccaaagtgctgggattacaggcgtgagccaccatgtccggcctacttaccctctttagacacatctcttcttatcatgtgatgacatataacactttatctggttagagaatatagttctcattagggctcaccactaatcaaaatcactgtttaacttcaagattcaaattttcatgtctgtcttctagcaccacatcaaaaattaataatcactgcatatttcttttatagctttgtatttccagataagcatttgaccattccataatactatgaaaatacttattaatgtgtttacatttttgaaagatcagtataaaaataaataatgtaacacccaagaatctctaattttttccaacctacctgattgcatttctcttcttgtcttagaacactcgattctgggagatttcacaatttcagaggtgcctgagtctaatgtcctttgtttttcttcgagagaagagtctgtagtatgttgaacaatgttttttttctctttcttatttttttgtgtaaattctttgctatccttcttcggacttatgtttgaatctatcttaaatttacatgaggttttcatttttttaattcctatagaattatctaaatcagttttattttcagaacccttgtgattagccttcttggtttctttctttttctcaactagattttttgaatcgatttcttttttagtctgggtttttttcttctttattttcttttgactcaatgctttgctatcttcaccagagagattggaatcagaatctgaaaggtcgtaaaaacgcttcaaatcctctgtagtgctatggctaatggggcgccctcttttatccacggcatagttcaacttgaacttcttgtcatgaaacatggctcgaaatctcttgtcaattttgacttttcgatccttttctggcatttcccaaaatctcgggtcctttgcaacccgtctaaaccgctggtcactcattatttcttgtttggatgacatttttaattcttaatctcgaccaaatgcttgaagaaaacaaatactgaaaaataaaacaaatgttttaatggtaataatggttagtacaataattaaatgttttaaaacacattcacaatatattctaagttaatatattctaagttaagtgtacataaaatagaggtaacaagtctaatttcatctctccaacgtattctgggtcacatgcaaaaaagcagaaacataccaaaatatcctctttccatgacagatcatttagagaaataaacttaaggtagacaaagcagaatcccagggctttatggaggggaacaaatgtttattcatccattgctctcacttagaatttctatttgtataccagtatgtgttactaattgaaggcaaatgtagttaagattccctaggccgagtgcggtggctcaccagcactttcggaggccaaggcgggcggatcacttgagcccaggagttcaggaccagcctgggtaacatggtgaatccccacaagaaatacaaaaatgagcccggcatggtggcgcgcgcctgtagtcccagctactttggaggctaaggcaagaggatcacttccacccgggaggtcttggctagagtgagcctaacggcactacagcacaccagctggggcaacagagtgagaccctgtctaccaaaaaaaagtaagaaagaaagattccctagcctccgttggcctcatttgtttcttcacattctggtctcattctgcttactccttatctccggctactgccaacaaacagcctttagttctgtaagactagcattctaactaaacagaccaaaatcaactcaggtttagctaagaaagtttcctttttaaattcgatcatccttcaaaagtaataaaaagtttaaaaataaaaagtaaatttgagtctccaggtaaagtctcacaccagttaataaatatcacttctttctataatatctgattctaccagtgatgaaggcccaagtgagctcattcccccaaaacatactagaacatatacatatgtgtgtataaattaatattgttcccttgtgaaaagtctccaatggtttagcatctctggatgggaattttgcaaagagccaaaagtcgttgattattaagcaacccccccccaaaatgattaaaagggcaatatttcttatttaaaaatcaagtccttttaattacactaactaggaaaaaaaaggaagctatcgctggtgcatttacacatttttcgatgtattacagcacttaactctctgagcaatcttacgaggtaggtaccacctcaaccaggagaagtactgcatgtattgtaaatgtttagaaggaaagcactcattatatgtcagataatccgagagaggggaaggcgaccggacctcactcccgacacgcgcccgcatccccgtagcccaccctccccttctgcccgctctctaattcggagaacacagggctggcccctgaactagggtctcctttccacctcctgtaccgcaggggggcagctaacagactgattcgagaagcgaccctgaaaaggatcgatgaagactgaagaatgagaccgaaaaaggctcaggaggaaggggcaaaacccctcgcagatccgaaagagatcctgttagagactagttttttccccgcgccacacacacacacgccctcaagcccttcatctcgagctcttcaactccagtccatccccactcaccgtccgcagtcctaccaagcctcacgtggggctcacacccacaatcctccgcgtgacgctccgccgtaatggcaagcgaactaggccaaactacttgcacgttccctcgagaagatctttggagtagacacaaaagccgcgctggcgcatgcgcacaaaaagcgccggcaattggggtcgcagctggagatgctgcggccggcagggctctggcgcttatgtcggcgaccttgggcggcgagggtcccagcggagaatcttggccgtagggaagtcacctctggtgtctctccccgcggtagcacctcgcccagaaccctgaatattttcgaccgggatttgaaaaggaaacagaagaactgggcagcccggcagcccgagccgaccaaatttgactacctgaaggaggaggtgagcccgcggggcggcggggcggcggggcgggcgacgcggaggcttgttttcctctccgctagttccggctaggccccgagctcaccccacctagccgtctgaccttgaccagcagccctgcctctttcggcctctactgtaatcacgcaaggcctggcctcggatatttgtaacatgctttcattcattcatgcattcatttcggcaacgtccttgaggctgaaaggaccttatagaggcctccagtgaagctccggagagggagagagtgggagagaaggttaggaggacccaaatcatcagggccttgcaggatagggacttggggttttcttctgtatctgcactgtccagccagtatggtaactgccggccacacatgtggctgttgaacacttgaaaggtgactagtccaattgagatgtgttgtaaaatacacacgagtatagtgacttagtatgaaaaaaggatgtaaaatagctcattaagagcttttatattgattacatgttgcagtgattatttttgatatattgggtcacatgaaatatattaaatataaatttaaatttttcaattaaaatttctctcgtttttactttttttcttatgtggctactagaaaatttgaaattacatatgtggctctcatgatttttggtcagcactgctctaggggaatgtgaagctcttgttttaatcagtggagtgatctgacttatgttttaggaagatcaaattaagatttctgatttgtcttggctcgtttgagaaacctttctccctgcccaggtgagccagagactgagggtttctactttcaggacacgcattctcaagttcaggcctcagtaaatttttattcaggagtggaacaaagttggagtcaagtataatgcaacaaacagttattgaactcatagcttgagcagagctctgtgcaagtacaggtctgatcagatgattgacagggtgtctttctcaggaagtcttaggctggtaatgtctattataggaagtttactaccaataaattttttgtgtctcacttgtaaggcatggtgcacgtactacactgctgatgtcgtgtacttagaagatgtgcgctcatagccctttccctccaaagaaagcacctggactacaacttgattgaggcctcgccaatttgtgagactagaacaaataagataaagtatatgagagttctttttataataaacatagggtgttcatattaggaatgacgtacaaggtggactcctgggaaaaacatctacgctcccttctcccttgcccttctctcaaaaagcaggtacatctgtgtttggaacttttaagtcctaagagcaactctggggtgtttatgagggaatgagtggaatgtggggaatactagactcccacgtctttattgctaccagatgaagctaggccagcaaaaggtggtgcttaccttatgactcttaaattgggatgggattggagcaggggaggtgcactttcctcagatttggctttttctaacttgcgaatgtcactcagaaaagttgttcatttatgagttccacaaaatttgttagtcatcaaataatagagtttttcttaagtgaccacttacatactcatctacaataaaccccaactaactaatttttcactttgtgtacctcatgctaatatccgtggacagtaatgtgcctgttgtgttccttttgcttttcatccttgtgatcttatgtcacatggaatgtaaaggccacatatatatatgtgtgtgtgtgtgtgtgtatatgtatatttttaagaatatttagtctggatttcatgaaattgacttctgaaataatttgcctcaattttgtttcctggtggtttgagaagaaagttcctgtggtgaaattgaaaaggggataaagggaagtacttattttaaaacataagtaacttgtggattgttgaatactggaaaaagagtgttacttccccgttaacctacgcctcgtgtaatccttcaggttggaagtcggatcgcagaccgtgtatatgacatacccaggtaagtggtggtgatcataatacaataccatcaacttttgagtggaaattcaggagattaaatgctgagaacttgctatctgaaatggcagaacctggaagaatttactcagactggtgatttaaatcactctgtaagtctcctttttcttgtctggagagcaaatgttttcttcattgttgcctgaaaaaagaaaagaatgtgtggaagcacaactcgtatctatctccaagcctgaatccacttgatttggccaaaagcaagtaatagaaagattgctccaaaaatggagatacttaacaacatgcgaatttttaacatccgaagcctctgtacctaactgtgccatattgcctgtgttcatcatcaagatatagggcattaggtaaataaggttatctaccaccagggattctccagctatgtactataattttgacaaagctttttaaaaacaaattgcaatggggctctttttgttccagtttttcaggaagaatgttcttagtagataaaattttaagttttcttattataggtttttttttttaaacctatggcctacaattagatgtctgtaccaatgtagcataacatagtgtatttagaggagacagcatggcatggaggataatagttccagctcaggattcagactgaccgaattcaagtgttgactgccccttgttagttgaggcacttggtttgacttacttagcttcagacacttagcacagtactttgaacctggtacgttttcagtaaaagtttaactgttacttaagttcttattttttagtttaacattaatacttaatggtatttcacatgatgatttctaagtattccactgcttcaagaagtctgagaaatagggataattattgataagtatgtcagttattttcaagttaatttacattagcttctttgcattctttatctggatgtattattgagttaaaatatcctcattaaatctgttcttcgagtccacatcatggagccacctggtggaaagctggctcatcacaaggtcctgtgaatagctagcagacagacttgccttgtactgtaggctctggtatatacagcttgtaaggtgaggctgaaaaggcagatgatgtaaccttctggaagttgtgtttactggaatgattttacctaagaaaaaataattcttaatttatagactgtgttatggacagagcataacctctgtgtctttttttttagaaatttcccccttgctttggatcttggttgtggaagaggttacattgcacaatatttgaataaggtatatttattcaatgacctaatttactttgaaaagtaacattggctaattttaaagaaagactttcctaatcagtttagcttgcaacatatttagattttaattatatcagaattgttaatttgtttttttttttaagtggtagaatcaatggtggttttctcccttctttagaatttttttcttaaagggtttttctctgaatccattatatattatgtttctaccgataatttatttgaatctatagaagatatatttctctttgttcacatttttttataattaccataaaaatcagattggcattcatacagaaaatgtgacttttagctagaaaaatattaattttatcagttgattagaaatctttctgtatcattaaatataagtagctttattaatgcttataacattgtattttgcactttataattcagaccatgaagacattaatttattcttttagctcctatctatacgatattgtgctggacacaaagatgaaagtggaatttctttttttttctgagatggagtctcactctgttgcccaggctggagtacagtggcacgatctcggctcactgcaacctctgcctcccgggtttgaacgattctcctgccgcagcctcccaagtagctgggattatgggggtgcaccactatgccctgctaatttttgtatttttggtagagatggggtttcaccatgttggcaaggccggtcttgaactcctgccctcaggtgatccgcctgtctcggcatcccaaagcgctgggatgacaggcgtgagctactgcgcccagccttaaagtggaatttcttttttttttttttgagacagagtctcgctctgttgcccaggctggagtgcagtggtgcaatctcagctcactgcaagctttgccttccaggttcatgccattctcctgcctcagcctcccgagtacctgggtctacaggtgcccgccaccacgcctggctaattttttgtattttttagtagagacggggtttcaccgtgttagccaggatggtcttgatctcctgacctcatgatctgtccgccttggcctcccaaagtgctgggattacaggcgtgagccaccatgcccagcctcataaagtggaatttctacgtaaaatctgcttagataaaaccatagacttgggccagggtgaggaagggagtggtggggctcctaaaacactattattggtaatagtaaatgccatagaaatggtgcagtcattaaagtgcaacaggaattaggggaaaagaaaaaatcagtaggagttcatgtggtcaaggattctcagggggcacagaatctgacctgggatttgaaagaatttgagttggtggttcctagcattggaaatcagggcatggcaggaggaaaggcacagaggtagaatgctgtagggtgtgatatagtgatgtttaaggaagattaatctggggatggcattcgagaaagattgaagaagagaaagggtagagaaacccatcagaaggctgtgttaaaggcattgcaggcatgagaaataaaggcctgccacccatgcagagccagcacatataaatgatgggatgtatgagagagacctggaagtatcaacagaacttgatgactgatcagatatggtaggcagagcaaatctattcttttagtaactcaacgccaaaaaacatttttattgattcctcttatatccttctctcccacatctaatccgtcagcagcttttatttgcatttcaaaatataaccaaactcttatgtcttcttgccaccttccccatcaccgtgctgttcagctatcatcgccccttgcctagattattgcagtagcctcctattggtctccctgctttacctttgtccctgacagtctgttgtcatggcaaagtatcctcgtaaaacacaaatcaaatcattgtcagtcctctgcccagaactgttagtttgtcatctagtttagtagtaatccagagtcctaatctataagaccctcaggattctgtttttttatcatgtctctgatcccatcttcttcctttcactcccaacttttcagcaaccctggcctccttgcagtctctcaaacaggccagagctttgctctatgctcttccccaaggtatctgtgtgtcttagttgctcacctgtcagatctttactcagctgacttcatcaaagattcctcccgtgactgctttagaaaatagtgcccctgctttctgccgactagttgctttatttgcttccatagcacttacaagctcctgatgtatgtttatttggtgtctttcttctcttactggatttgctcatttttgatcactactaaatcctagtacctaaatcacaatgagtatttattaaatgactattgcaagataactttagagtttaagttacaccttttgtgactggaaaattcaggggatgtgatgtggcaaggagcacgggatcattcctgttttagatatgttgagtttgagatggcagtggaatatggtagtataaatagctggcaggtagttggaaatgtggaactggaattgggatattgaggttaagagcattgacttgaagtcagggcttcaaacttcagctctgccactgtctgtgtatactcagaccttgggccaatcaattgctctagacctcagtttctataaaatatgatcaataatacccatctcaaaaggttggtaaggggattaagtgaggcaaagtaaacctgtcaaaggaggctatagttcttatttggaagtccctttcagaagtgacaattgaagccgtagaaataggtaaactctctgaggcaagaatatagaaaagaaccttctgcaattgtacttagggttgggagaaagaggaagagccaataaagatgccaggaatagtaagatggaaagtgtcttagtaaggtatcttttgattgttgaaagcaaaaatgtgctgaagccagtttaaacacagagacatttgttacagagaggctcttatgtaactcagggatccagaaatagagccaggcctcacaagagatgggaactttgaaacaccataacaatgttcctcctgttcgcatgcactctggtactacatgaatgctgtctggttgccttcattctttttactccctgtagtctatccatagtagtgttcatcagtgtgtgtggccccatatgaatatgctacacccaagggtagctgaagctagcttaggccagcctgtgagagccaattgttagcatctcttcccaacctctgttctgtgacatcatattgatagcttgacatcagccctggtgggaatatttataccatggaagttggcaaatgctacaaagcagtccccaaccaagagccagcacaccactgcctataccctgaagtctaaatgttcttccaactccagggacctctgctattatctcgaagtctcttagttcaaattttcaagtgagagacagggatagataatcctgtccatctaattcttcacccctcacaggagtgtgctggagctggctcatgagagctattgagcactcttcccagctccatatttagcaacatcatgttggtagcatgaaatctttccaagtttcagacagggaagtgggtgtgggtaaagtaaaaaaggattggcttctctaatagagaagggcagccagagtagaagcttctgaagaagcttctagtaggctgttgacaatgctgtgcttcaaagaggtcaggtgaagcaggactgagagcagtgagcacagactgcagatagtgttagcagagcagtgaaagcaaagagatacccagaatggggagaaagaatctaggaagaagtagagttgtggattataaaccaaacaaccagaaggtacctagagggaggagattttttgtaattggaaagcttgtgcctgttgtaaggtggaggaaggagacacagaagacacagactaaagattgatagagatggagatggagagagcaggatcccggagaaaagagggctgagggggaaagaaagtgtttttctggtgcagaaatagcacagtctcctttccttttggaagggagagagggtaggcgaaacagggaaaatggaaccctaagcctctacctgtaagtctttctttactctgtaaactctttggatgaacaactaaaaggcgggaaactcatagcaggtcctttgtgacacaggagtggggaaatagctcttagcatgttatgccatggaaaagttaacacggaagccctcacccagtgtagtaaattcggaatgttgaatacgcatactcatgttctctattttattacatatagttaaatatagcaaaggatatgtgttattaaaagtatttgtgtaccatactggttttatgcagaaatatacctttacaaagctgaaaattaaaatgtaattaacacttttacctttagaaatgtcagcaattgtttgtgactggatttgtttgtttcagcttcagttattccattgcaggaaactattggaaagtttttccaagctgacattgcagaaaatgctttggtaggtagctttttaatactgttggtttctaatctcgtgatgtgttttctcatattttatttctttatttttatttccttcaaactagctttcttttctgacacatgaaaaggaactcatacaggaaatatcaagaacaaaggaaaaatcacccctatcacccctagtcctaccattcagaggcaaccattggtggcacttggtctccacatttgcagacatataactgtccccgcccccccaacacacaactgtgtatgaacattactatgctaatattccatgttatttacggcacatcattttttttgtcagtgaatttatacttatgtgtgtcatatatcatctttttaaatggctacatggtattctaatatatgaatactccatagtttatttagctaaactttctattgaagggcagttacgtttctagtttctcaataaccaacactgcagtgaaaatccttatgtgaagccacattgtatgtttgatttatttttttccgtgggtataaattcctggtagcggaatttatggattcattttgatgttcatttaaaaattttttgacatacatcttcagactgcccttagaaagactgaacaatgacaaaggtactttttactactttgctttggcaacactgggccagccttttcgtctgggtcagtctgacagctgctgatatcttttgactattggtatttcttgtgaattttgtaaataattttgtgatatgcctgcaccttgtcctctttagctatcttgtgtttttattctaggtgatttgtaagagcttggtttttagggatattaatccttcattgtatatgttgtaaatattttcctcagttgtttacattgtttattgatttctattaatagaagtttttaattagtttatcatcaaatatatcagtcttttcctttacagtttctggcttttgaattatgtttacctaggctttttcatctaagggtaaaatgtccagtccacccatattttcatctagtacttcggttgtttcactaaaactttcagccttcttttttctttttttttttctgagacagtcttgcactgttgtccaggctggagtgcagtggtgcgatctcagctcactgcaacctccgcctcccgggttcaagcgatactcctgcctcagcctcccgagtagctgagattacaggtgcgtgccaccacgtccagctaatttttgtatttttagtagagacgtggtttcaccatgttggccaggctggtctcgaactcctgactttcagtgactgcccaccttggcatcccaaagtgcagggattataggcgtgagccaccacgcccagccaaactagctttctgagatttgttttggtgtgaggttggtatcctgtttatgttgtttcaactagttagccattttttctggctgatgttaagtcatttaagaaatgctttttgggtgccttctctgtgccacctttgggaaggggggtagaaactgccaagtaaatataacattgacttcaatttaacaaacagtgattgtgttagtaattgagattctacataaatgtgattttgatctttcgttttcttaacattagaaaaattcctcagaaacagaaatacctactgtcagcgttttagctgatgaagaattccttcccttcaaagaaaatacatttgacctggtggttagcagtttaaggttggtaatccactttttaaaaaccatatgttataaacagatcattcttgccataaagttttgctatgaggccaggagcggtggctcacgcctgtaatgctagcactttgggaggccgaggcgagtgaatctcttgaggtcaggagtttgaaaccagccttgccaacatgttgaaaccctgtctttactaaaaatacaaaaaaggtagctgggcgtggtggcatgcatgaacttcctaaagttcatctgtgatagaaggtttttctccccagtgcatcttaatattttggaattgctcttgttgggagcaggagtttgaaagagcatattggctcctgtattcaaatgttagagcaattccaaaataataagttacattggggagaaaacccttctatcacagatgagtttagcaagttgggggaaaaaaaagttgaggcactatatcatattatctccaccagagagcatagaatatattctttcaaactcctgctcccaacaatcataactcattctggacaaattctggacaaactcattctggacaaactcaaactaggacagctagttttcctttagccttaattcttctggccaggtacagtggctctcaccagcaatcccaacactttgggaggctgcagtaacaggactgcttgaacccaggagttcgagaccagcctgggcaacataatgaaatgccatctctacaaaaaattaaaaaattagctgggcaaggtggcgcatgcctgtagtcccagctacttgggaggctgaggcaggaggatcacttgagcctggtaagttgaggctgcagtgagccatgatcatgccactgcactctagcgtgggtgacaaagcaagaccctgtctcaaaataataataattctgtaccagaatgtagttctcaagattactcttttccctttatgttttctactatcttcctccacatatgttacacaaacatgtaatgcaagtatatatcaaataggttataggatacaaggcactgagccagatttttgggtgaatacaaaaatgaattagggatcctgtcctcaaataactcagtctaacagaaaaaatatctttgtggtatcttctttctcctgtcttatagtcaaatagattttctttcagaagttcagcaggctctccacgtccagttcaactctttcgatagctgtttttagggtgaccagtcatcaaggtgtgcccaggactttgccacttttggcctgaaagtcttatgttctgggaaagctggtcacccttgatgttttctttcgtgagtgtgtaattccttccctggttttttagatgtgctgaacaaagttagaaaactactcacattctgtcatgaaatgaaaaatatgcagagccttggtctataaagaaccctgggcagggagtcagaacctgagtttttatgttagctcatctgcttgctatttgcaggtgactaattctgttgctttctgttttcccataagtatgatagagtttatagtatgagctccttagtttttaaagtatctaatacttgtcgaaaagcattaggaaagataaacatgagcttaacacagtatggtttgaaatggacattcagttctgtcctggaactcagcataaggggaggcagttataccagaaaagtgtgaccgtactctaaggagactgggaatatgactttcgctgtcacgcatgactacactctaggtgagagtagggtcaaaagaaaattcaaggcccgggcacggtggctcacgcctataatcccagccctttgggaggccgaggcaggcagatcacttgaggccaggagttcaagaccaacctgggctacgtggtgaaaccctgtctttactaaaaatacaaaaattagctgcatgtcatggcgcatgcctgtaattccagctgctcgagaggctgaggcatgagaattacttgaacctgggaggcagaggttgcagtgagccaagatcgcgccactgcactccagcctgggcaacagcaagactctgtctcaaaaaaggaaaaaatttaagagattaagtttcagtgtatacagctctggtttttgtttgtttttatcaccttaaaaaatggatgtaccacacacctactagaatggccaaaatccaggacactgacaacactaaatgcgacaaggatgtggagttcattattggtgggaatgcgaaatggtacaggcactttgcaagataggttggttgtttcctacaaaactaaacatactcttagcgtacgatccagcgattgcatgctccttggtgtttacccaaaggagatgaaaacttacgtccacgcaaaaacctgcacacaaatgtttatagtagccttattcataattgccaaaatttggaagcagccaagatgtccttcagtaggtgaatggataaactttgttgtatccaaacaacagaatattattcagcactaaaaagaaactgtcaagccattaaaatatttggaggaaacttaaatgcgtattactgaatgacagaagctaatctgaaaaggctacatagtgtgtaattccaactgtgacaatctggaaaaagcaaactctggagacagtgaaaaagattggtgattgccaggggttgtgtaggggaaggatgaataggtggagcacagaggatttttagggcagtaaagctactctatgatactattataatattggatatatgacattacacgtttatccaaacccttagaatatacaacaccaaaagtgaaccttaatgtaaactatggacttgggggataatcacttatcagtatagcttcatcagttgtaacaaatatacactctggagatattgataatgggggaggctgtgcatgtgtgggaataggagtatgtaaaaaaatctctgggttttcctcttaattttgctgtaaacctaaaactgctccaaaaataattaaaaataaagtcttaaaaattgattttttaaaaaatgggatattattggaaaactcacagattcaaacttttgatgagttacactgtttgccttgaaaaaatttagatctgcagataatttttttctaagaaagtctgacttagaataatactatatttctgtagcttaattgatttaactgatgagcttctttgagcatttttactactttttgcaaataaggtctcagaatagcaccgtttagataaaatgcctaagtaggaatgacttttacataattcagtgatgaataattagaaaataatcatatcagattctttcagttacgcaaagtgatatattgacatggggaattttctggtgtgacacaaggcaggttttcctctaggaatatttataattttaaaacctgtatgaaaacgatcagtggatttggatatgcagttttaaacttcaaaattaacacctttttatgggttatcattaacctggtgataattttactaattaattgtgccagttaagctaaaacaaatctgtattctcatattttagtttgcattgggtgaatgaccttcctagagcacttgagcaggtaagaaaacttatgttcattcaactatcttgtgttattttctttattgttagaaatctacagatgtttctattttcacatactatttacttgtaggtctgacagttgggaaagaaatcggtgaaatcatctggtgccatttggcatattagtagtacattgggcaactctcctttccctgagaatttaagaaatctaattgtagagataagttttaaatatttatgaaaagcttaggaactgtgcaaaataatattgaaatcataagacattctctatgtagatttcttcttacccttagttgcccataaactttttgcaagtaggaacctacttatttatatttgtattttctccatgccttatactcagagagtgctaggtaagtttttatcgattgacacgtatcaatagacaggtgagaggcaggtaaaaagtatgtgttcaaaggagagaacaagatccctgtggcttgacatggcctagaaaagcttcaagaggaaagtacttgagcagggccttagagggtaggtaaagtttggattgggaaggcattctaagaaggcagaatcacaggataggtggagaggcacaagagcttcatcagcattaaggaacaaaaaggaaacctgtttggaggactagtatagtgctgggaagtgaggtgtgatgtattgggacagtatttaggaggatttgagtgtcaggttgaggaatttggagtttatgcaattcagagccactggagcattttgaagaggaaaatgacatcattataaagctggtgggcaaaataataatggccatatctgaacacgtatgattttccagtttcccgttactgtgctctgttttatatttgtgttaaatagctctgcgagatgtatttattttgctgattagaaactgatgcctcggctgggcgtggtggctcatgcctgtaatcccagtactttgggaggctgaggtggttgcatcacctgaggttaggagttcgagaccagcctggccaacatggtgaaaccccgcctctactaaaaatacaaaaattagccaggtgtggtggcaggtgcttgtaatcccagctacttgggatgctgaggcaggagattctcttgaacacgggaggcagaggttgcagtgagctgagatcacgccattgcactccagcctagacgacagagtgagactctgtctcaaaaaaaaaaaaaagaaagaaactgatgcctggagcagttcgttaaattgaagggagactgtttcagtggtccaagaatgagataaactaaacctaggtggtaatggtaggagttaaaaggaagagtatttaggactctacaaggaaagaatcaacagtttggtgactgattagatctgaagatcaaagggaggaggcaaaactcactttgaagtttttgagtctggattagtaaaagtaggggaaagaatgttaatgatcagataaagggaatagaaaatggcaatagaaatatggcagttggaaaggggaattgatttgataaatagatgttttccttgtaggggttggagggagcagggacggtgagtatgctgagagacaaatgtccagggaataggcagttgaagatgactttggacttctgagaagatggccaagctgaagttagggattggaaagtggtcattgtgaaatcatggaagttgataagctgtctgagggagagcggggagctgcagaattctgagaactaagtcttaggtatttggtttagtagagtttgatgacaggaggaggaagcaacactaaaggtgaagaagggaaggaaccaaagcttttacaaattatttacttaatactgcttttaattgcttcatgacatattaaatataaatttaagacagtacttttattagaagagcctactgtgatttggattctggtttacttcagaatctaccttttcctgtaatggtcctcattgctgagaatagtcaatcaaactagttacagcttgtagtctgagagtgagcaaaatctgtgattctggaattctctctggccattattttccttaagttactaattagaaattggttttgttttaaagctggaaaataaattgattacttctctttaacgaaaggtaatatgttactaggttaatgctgtgaatcataatgatttctctgtagctttttctgcataataaggcaccccaacttgatggcttaaaacaacaactatgtagcccatgattttgtgggttggcagttggggctggatttggttaggaaatctgggtctggcttggctcatctgtgtgtctgtgatcagctgccagatcgtctgggagctagctggtttggagggcctcggtgcacacagctggctgatctctgccctacatctctcctcctcctctaggctagctcaggcttgttcacacatcgtggctgggctgggctccaagagagcaggtggaagcatgcaacacatttgagacctagacgtggaactggcacactgtcacttccactgcattcttttggccaaagcgagtcacaaggccagccaagattcaaggggaggggaaatagactccctatcttgatgaaagttgttagaaaacgacgtttcagaggccatagatgcagggaggtttgtgatttttgcagcctaccccaattaaatttttttttctctttcagcatttttctgattataaaactaagttgtatacctattagaaaacttgaaaacatacaacatatttttataggcattaatattagtgaatgtatagttgtctttccaagtatattatgcatcatgattttctgacagttggttgcattagatgttatttgttaaattatgtgattattaatttggcagaataaaagtggttgtcataaaatgttaatttagacactatatatttattttttaacatttatatatataaaaatttgaatcattttgttttcttgtatttattacagattcattatattttaaaaccagatggagtgtttatcggtgcaatgtttggaggcgacacactctatgaacttcggtgttccttacagttagcggaaacggaaagggaaggaggattttctccacacatttctcctttcactgctgtcaatgacctgggacatctgcttgggagagctggctttaatactctgactgtggtaactatcaagttcgattaacccataacttacacagttcaaaaaagaacttcttatcattttaaagatagaaaactgtatgtgttcatggtttcatggcactctttctctccctttttttttctctttttaagggaaaagctctgattgacaatgtttagtttgtataacacatcttaattgacacaaggtaggaatgtataattttttactgttaccttaaaaagtagctcaaaaaatgtatcatagttaacaagacaaatttctaaacatacaactccattagaatcttcaaatctagtattaggtgtaaaaagggccttagagtattccagatgataggaagaaaaggggataagtaggggaacctgtaatattaccaccaataactacccccaaacagtgccatatgaagcagaaatgagagaatgtgtgttctcaaggcctagggtgagatcaaggctaaagaaggtaggacagggtgctgtactccattagggctagagaaatctcgaaagaagacccatgggcaatcagtgagtaataagcatgaagtcagcatggtacggtgacggggtaggacagtaggactttgttctccgacaggagtaacttggatccttaccctatttctttactagatagggaaatttgagtaacttacctttttgagcatttatttcttttaaaaatgcaaatgtgtggctgggtgcggtggctcacgcctgtaatcccagcactttgggaggccgaggcaagtggatcatctgagatcaggagtttgaaaccaacttggccaacgtagtgaaaccccgtctctactaaaaatacaaaaaatcagcgaattgtggtgatgcatgcctgtaatcccagctactctggaggctgaggcaggagaattgcttgaacccgggaggcggaggttgcagtgagctgagatcacgccattgcactccagcctgggcaacaagagtgaaattcccgtctcaaaaaaaaaaaaaaaaaaagcaaatgttactcacctcaccctttaaagagataaagggtgtgaagtaccaggaccatggtagatgctcagcttacattagctcctgccttcctctttccccatcactctactcccagcatttttctagaactaggcttccaagagacagccatctggagagaatgattgccctcttcttcctccctccactaacagtctttctaaaggatgtcattactctcttcagagatcagtccagtagacttaatatgaatttccaaacccctcaggcctagaaacatccctaaacctgattagtggaaataggaatttcttgatgaagaaagcatcttgctacataattagagatgataagcttaaacgctaaaatagctgtttggcatgattttgtgtgaatatattcatgaaatcaaccaaccaaaaatagattgtgtcatatccttccttgtttttatagaagcaaggggcatgggcaagcagggcccctgatgttggaaaggagcctccagggagggaagaattaacaggctggaggactaggctgggaactgaagagaaccccggaggcttcacacctgtgactagtgttgatcttttgttaacttttaaatggcctgagtccatagaaactgcatcctgagaggttgctcggctagaaagcggaaaaccgcttcacatgagtgctctactttgtaatgaaaataaacactattaatacaggcaattgtacactgaaggatcattgtatttatatttgtaattgtataagtaacacaaatatattttggttgtaactattaagctatacagataaagcgaaagtctgtcattcccccttaatcctaaaaatgcttagctctctcttgagagtaagagttctcaaaattttggtctcaggaccccactacacactgaaaagtaatgaagaaacttttaaagggctttttgtatagtgaattaacatctgtcagtattcactatattagacattaaaactgaatttgttttcgtattcatttaaagctaacaataatatacctattacttgttaacataaatgaccctttttaataaaaaataactatattttcttttaattttttttttgggggggggacagtttcactctgccacccaggctgaagtgcaatggcacggtcttggcccaccacaatctctccctcccaggttcaagtgattcccctgcctcagcctcccgagcagctgggattacaggcacgtgccaccacgccccattaatttttgtatttttagtagagatggggtttcaccatgttggccagtctggtctcgaactcttgacctcaagtgatccgcccacctcagcctcccaaagtgctgggattacaggcatgagccgctgcgtctggccatattttctaaaacaaaaataattgaaagggaagaatgacattgcttcacatttttgccagttaatgtgcaccttagtaacagagctagattctcatgtctgtttctgcattcaagtttcttgttacaccatgtgtcatgtcatgtctcctctaaaataacccatcgtagaataagaggtaaaaagccaaatagtatcttggtattattatgaaaataattttgactttgtggacccccaaaaaagtcctagggaccccaggactctccaaaccacacttggagaactactgtcctagaggtagctactattatcactttagtgtgtaaccttccagacttttttttttttaacaaggactactttatatagacagtcatatgtattcacacatttctgaaactttttttattaacagtatatgtatttccaatatactgttaatagttttctaaattggtatggatatatttgcactccttaatttccgcatattatttcctagtatgaatgtaccacagttttacttaactatttacctgtgaatgacctttaggtttgttctgattttttgccaatagtagcaatgctgcagtgaatatccttctatacaaattcatttatgtattcagtcttgcaacaaacatttactgagtaccttctgtgtgtctggtactatcctaggtacttcaaatatagcagtgaacaaaacagaaatccctgcgtggtgtttttgggtttatagcaggcctgttggtaaactttagaccgttcaataatactgggatgttgtacacaaaatttgtggtggtggtgttcataaatggaggaaagtacccatggttttcatcagatcttgagagagctaatataactaaaaatagattaggaaccagtgatttaaagcctttttgataatatttattttacttataatatggaaaaaatttcctttacagtctaccctcttgagaatcgtctcctatattgctgtgtcaccaacctatcattgagatgaaaaaagaatctccgggaatgtaaagcctctaaaaagtataggaggtgtagggctgggatggtgtggcgatgtgtagtgcacattttcatgaggtgatgttaaaaaatttatacgaggtcatacaggttagtcagcaatattacaggactcaaaagttattgcccattacgaaaaaaatgggatttctgctaatcaccagaagaaagttaaattatgtgaactacacatggttttctgtggttataaagaatgagttttagaaagatttctactaaaaatgtttaacctgatgttaaaatgtttaaaagcctacatttctattaattgggaaatataattcagaatactatccatattctctaaaaatgagcctaatgactcatactttaatataatataaaaatattggtgtagaatcttctttagtttatacaattagaaagttgctgatttaataagaaagttatgagaatgtcttcttgaatcattacatttatcctgtgaggcatgtatacagttttgtttctgaggtgctgtattaatattgcgtcctggccaggcacagttgttcactcccataatctcagcactttgggaggcctaggtcagagaatcacttcagcctgggatttcaagaccagcctgggcaacatagggagtcctcatctctaaaaaaaaatttttttaaatagctgggcctgcctgtagtcccagctactcgggaggctgagttggaaggattgagcctgggacgttgaggctgcagtgagccatgatctcaccactgcactccagcctgtgtgacagagcaagatcctgtctccaaaaaaaataataataatatgtgttctaattcattttctaaaaattcccatccaaaaaagcttttgtataatcagctatacaggtttatgttgcatacattagatatattacttttacgctacaatggatttttatttttaaagtgaaatcgagtcagattagtatcatatagatgtatttacatcttaatgtattttcatcttaatgaattattttcagagaatgagcattctaagtaaagctgatttccgttttagaactgaactaccagactagtactttaagagaatggtgcaaggcctggcacggtggctcacgcctctaatcctaacactttgggaggccaaggcaggcagatcacaaggtcaggagatcaagaccatcttgactaacacagtgaaaccccgtctctgctgaaaatacaaaaaaattagctgggcgtggtggcacatggcctgtagtcccagctacttgggaggctgaggcagtagaatagcttgaacctgggaggcggaggttgcagtgagccgagatcgcaccactgcactccagcctgggcgctgggtggcaaagtgagactccgtctcaaaaataaaataaaaaaaatggtgcagatatggtccccttttaatttaaataaggccttcaacaaagctgttgtggcattcttttgattgaagtggagatagtgcttttagttggttgcactgaagaattgttttcaaaggatattgcttaatggctagataacagcctggaaagaattttgtttttaatcttaggatctcctcttaaaaacagcttgttaatatggaaaagtatatggatgatgaatgttcatggtctcactacctagaggtctcattaaaaagcatacacaacctgatacacgtatatgtttttttaaagaagagtaaggtatatatagagagagtgatacagtggggtgtaaagtgaaacgaagtctcctcttcctgacttctccctctgttgcccaggctagagtgcagtggcgagatctccgcttactgcaacctctgcctcccaggttcaagggattctcatgcctctgcctcccaaatagctgggaccaagggcatgtgccatcacacccagcaatttttttttttttttttgagatggagtcttgctctttcacccaggttggagtgccgtggcgtgatctcggctcactgcaacctctgcctcccgggttcaagcgattatgctgcctcaggctcccaagtagctgggactacaggcaccaaccaccatgcctggctaattttttgtatttttagtagagatggggtttcaccatgttagccagaatggtctcgatctcctgacctcatgatctgcctgcctcggcctcccaaagtgctgggattacaggcatgagccatcgtgcctgtccctcctcctgacttctcaaaccctggtccctttccccaaagatttgttagctgtgtcttagacatcgtttcagatccacttttttttatagacccatagaatacacttatgtcatttaaacttacttatataatattacatgcactcttttgcttttttttttccagtcaataacatgtcttggagatttttttcctatagacatgtatctaccttattttttgagaactgtacagtattttatagaatacatattctttaatttgtttaaccagtcctctattaatgatgtttagatttattttaggctagtttccagccaggcgccatggcccacacttggaatcccagcactttgggaggctgaggctggtggatcacaaggttaggagatcgagaccagcctggctaacacggtgaaagcccgtctctactaaaaatacaaaaaaaaaaaattagctgggcacggtggcaggcgcctgtaatcccagctactcgggaggctgaggcacaagaatcgcttgagttcaggaggcagaggctgcaacgagcagagatcacaccactgcattccagcctgggcaacacagcaagaatccgtcttaaaaaaaaaaaaaattattttaggctagtttccaataagaataaacccctacttttagtgcctaacacaataaagttttatcacatcacagctgcgtgctggtgggacagcccatctccatcttgtagctgtgccatctggccctgtgttctataatctggccctgtgttctataagatcaccacagcaaaagagatggcctggaaaaggctctagctcttaactgtcttgcccctcctttctttggccaaaagaaatatgtgtttgagattgggaagtgtcaaggagcacctggatatttggggagcatcagtggtctctgccactgtaccaacagttaagtcctgtatcaggcttcaaaaagaagaggaagtcattacccaattgttcatttgagaaacaaactccacatgtatcagcaatgtgctcatttcctaaacaagcctattggctgcattactagatatagaatgaaatattttgattctaggtgccccattttaagaaagattgatattgacactgtccagggacatgtagtcagaacatgtaaggatctccagatttttgtgtcctgaaggttttcaaagacttggaggagagggcaatggtttgtagggtacagaatactcttattctgtgtggttcccaaagagagaactagaaccaatgatggagttttaggatgatttctctcacaatgcaggatatttaatcagcaattagagactttcataaatcaaacataagccagatgacatctatgaagaatattgtaaatattttttgcttagcatgggagattggtctgggtagtctctgcggcctcttttttaaatctggaattttgtatcatgaatgtcaaatgaatatttctttttctttttaaataggacactgatgaaattcaagttaactatcctggaatgtttgaattgatggaagatttacaaggtaaggcactttaaagaatttttagactccattgggaaaggtaggccaaaaaaaaagaatttttagactccatttgagagaaacattttgagagccagctctttggcaggcactgggcaaagcactagggatccattgttgaggagaaagcagactgtcttcatggagcttctgatataaaatggaggaggcaggcaccaggcagctgtcacagagataagtgttaaattagaattatggtcagtgctatgaagtagaggcatatagtgctacggctgtttgtaaaaagatggcgggacttttttttgaagggtgcacttgaggatgatggaacacattggtgacttccttcagccacacttggcagctgagatacaggaatgaaggtagttgagttggtttagaagtagggttttgtcagggggaaatgtcccagtctgggagactcaaaaagaagtgttatctgaggaagtagcaattgagctgtgctctaaaaaaaaatggagatgaattaactgggtagacagagtaggcaagtgaatctgaggcaaggagaacagcatatgcaaaggccctcctgtgagaatgaacatagcaagaactgaaagaagggcattttggctggtgttcagggagtaagaaggagagagttaagtgatgaccttggtgggtcaacgtgagtcacagatcaaatgcagaagtactttataggccttgttaaaattgtttgcccttatcttaaaatgccccttgaggcatcttagagaggtaacagtatcagacttggattttgaaaagagtagattggcagataaactagtcacgagattaatttcagtatagcttgctgagagatgatggtagtttgtactaaggtggtggcaatggagatgaagagaagcagattcatcccagagatgtttaggagataaattttgcagttcctgctggtggattggctgtgggcagatgaaggagaaagacatttgaagcttaattgctgagtttctagctcacatagagagatggtgtccttcattgatagaagaaacaatagaagaataccaggtgtgggcaggtacagcccttgagtttacatttggatacattgggtttgaagtgcttttgaaatacctaagaggttatgtcaagtaggcagttgagtatgtgggtaggtagctcagaggaagctactggcttggttaaaaagttgggagtcagttgtgaataggtggcattcaaagcgtttgcctaggataagaacatggagtgagcagacaaagtggcttggtactgaggctttagcaggtgggtagtcgacgtctgagcctacaaagagactgagaaggagtagccagcaaggtgttccagaaaaacaccagaaaagtgtagaattgcctgaaccaaaggaaagaaagaatgtttcaaaacaaagggagcacttagcagcgttaaaagcaaactatgaactgaaaaggaagtccgctagatttaggaacaagaaggttattggtgaccctggtgagagctcttttgttagagtgaggagagtagaagaggagtaggttgaggagtaagtggaaagtgaggaactggagatagcagatatgtgctgttctttcaagaagtctggtggtgaagaagaggtgaaggatggaaaggttacaggtgtcagaagagaggagaggaatagaagttgagatgaggttgtttttttttttctaagacttgaatttatttaattgctgactagaagaatctaagtgctttcctagaagaggtgactctagaagagagagaaaagataattgatgatgacaggtgtctgagaaggtgggaagggtgcaatacaaaggccagtggaggggttgaccttggtaaggggagaggcaaagttatagcaggaagggagaagaggtagcaccaaaggatgtaggtgtttatgtttgaaaacaagaagttcccatcttgtgggtctattttttttgtcaaactggaagtaatatatgctaagaatgaaagggtcagagttttgagaagtgaatggaaccgtttgaaatagtcattatagggaatgagaaggtgaactgaccatcaacaggaggtggcagctcaggaccaggcacgaaaatcggatagttgaattagtttgggttgggggtttgctagttaaaagtgacaaaaagacaaaggtaaaagataattctaggagtataattgagataataggttaaagaatcttagctggaagaaaagggaagtgggaacaagaaagagtgagctgataaattgggaggaaaaagaggagctgagcacaggtggttccagtgtggtcagggatggtcacggttgaagttcctgaacacactggagggacaggagggtatggtcagaaaatgagatgtttgatgattttggaagtaaagcagttacaagtgataatggtctgggacgtgtctcaggtatcaaggcagaggtggtgtgatggagtggttgattagagatgagattttaaaatcttaacttgctgattattaacatgaagtcacccaggatggtggcagtactggagtgtagaggaaaactgagccaagtgccaaacctttcagtgaatgaggggagtgactagcctgatgtcagacagcaagcaggagttaggaggagctaacagccttctggtgtggggcctcagcagggtgaaggtgtttaatagggtagggaagtaatggcttggaagaggcttcaaggagtaagaaggatacagatcaaactctgaaagaggttagatatgcaaaatatatgcaaaaataaactattacttgaaagggatgctggagaagcagtttccttaaaagagagcttcaacttgcgtcctttgtgggaatttgtgaggtggttcttttatatatatagactgacatcaaaaatcatttcgatgaatgggggaagcaagaggggttaaaggtatgttctgtgaatccagaactacacttacctaggggagccttcatctggatcctgaaaaattgtaagatgatttaaagaaagaggattatacaaataagtatctagtctttacttacagatttatagtcttttgtgagcattgttgttcttgcttgcttaagttacgagtgagaataattagggccaaagagaacagttacctgtcaagtggcagaattagctgccaaactcatgcttcttggctctgccctggcactgtctgaactgaccctgttccttcttgtgttgcccatctgtaacaaggttcatttgacctatcgtgcagcctcctctgagtgtggagcttctgtcactctgcaaacggaaagatgcgtagctgaaatcttaccattgtcatcagttttcattcattaatagagggattggcagcctgtagcatgcatggccaagataacagaggatcagtaataagtcacacacaccccttccccagcataccccaaggacttacctgatgtaatcaaggagccactttatccaaaggcttgagagatgatggtgggctgatgatatatcactcgggctctaataataaaaatgttattcaaatacagcatttatttttgttctgctgtagaatctgtgttcatgattcatttcaagaaagaaaagagaaacatactagaaattagacctctctgttggaaaaagttacttcccactgatttcaacatatgagcagcacttaactctgtgcttagtgcaattctctgaggtttttctaataccctaattttaccggtgagcaaattgaggcatcgagaagttaagtatcttgtccatggtcacactgaatctgtagttacaatttgaattcagagtcctgtactgcatatttgatatgtatgtgattctttaaattcaggttaacatgtatattcagcgaaatgtattaatcttaaaggtacagctgcttgtattttaaccaccatcctgaacaaaatattgaacattttcagtctcccagaaggtagccttgtgctccttccaaattgataaccccctcttttcctaaaggtttcttgtttgtttgtttttcagatggagtctcactctgtcgcctaggctagagtgcagtggcacaatcttggctcactgcaacctctgcctcctgggttcaagtaattctcctgcttcagcctccctagtagctgagattacaggcatgtgccaccacacctggctaatttttgtatttttagtagagacagggtttcaccatgttggccaggctggtcttgaactcctgacctcaggtgatccacccaccttggcctcccaaagtgctgggattacaggtgtgagtctcctaaaggttttaaatagaccgtatattttcagaaactatggcctaatactttcagatgctttcgtaatgctgctttttcttaactgtaatgtctgttacagaaatcagatgtcttagtttttgatacatcttatccttaggaatattaagagaaattatttacacttataaaatgatatttaacaaaatagatataatcattaacaggttggttttatataccttcacttagcgtttattgagcatctacccatgtgccaaccacggagccagtggtggaaatacgtagttcctgatctcagggagcttatgttgtactagggaagaagaacgcaaagatagagacagactcctacattcaactgtaaaatgaaatcatttataataaagtacaaggagaaacacaggaggaaaaggccctaaatctgcttagggggtcaggaatgcttttgcaaaagaggcagcacctaaacgaaaatgagtttgcccggagaatgaaaggtgggttgaggtttaggggagctaacattgcatccacatggaggtagaataggatatgcacatccttcactctcctgattaaggaatggtaccataatccagtattccttgagtatatagaacggggagatgatgggaaatgaataggatcagaggcttctagatttttttcagattagcgttgtaatgtcttggaagaattttgcatagaggagagaaaatgagatacatttgtgtgtgttagaaagctcaccttccagcattgtttatgaggcatagtttatgaggaagggaagactagagctaacatggttaatctgtttgtttgtttttttttaatgtgtgaggaaacccaggcagaagttaagtaacttgtcccagatgttgtaattagtgagtggtagagccaggatttaaacctagtcgaacagcctgatttgtatgctgaaatcttagccattctgccttggaaaaagtcagaggcagatgagatgggaagaagcatagtcaggggatgatggaggcagggagaccgtgggagactttcaggtgtgccattctgctgactagaagatcatgttacttccaaatttgtttctgggattttacatttgtggtgtattttttttcttaatggttgtggtgtgtctcatttaagctgctattattaattcacagaacaaaagtccagaatgttgacctaattttacaaaacaagctgcatatcagctgatgaatgcatgagaaattttcaaggctttcacagtggtcttaaggtaagttcagttatttttttaaacaatactcagtattgtttttagtaaactgtaataaattaggtttatttttgataagcagttgaacttcaccttaaaaacactgtgagagtcttaaacagttaacctactagccagatttttctgttatctcaaagcccagggcgagtcggaagtcccaaagtttcagtttttcccaggtggtcttcagtagaggtcccccatgatgcattaggaggtgttactcttttgtagatggcaaaactggaattcgatagaggttgaatgactttgccccaggttatataagagttaaaactgggagtgtgatcccaaagtccagattctttccaccaccctcacactgcttctgcaagaagggagtttcagtgtggcagtgtgagtggcttgtgagggaaggctggagtgctgcacagttacgccctgtgctctgcagtagtgctcttgaatttctgtatggctgatgtaggtcagaccttcagagagtgttatgcctactaatcttaattagtatatcctaatactgattgttagaaggcattttagaatttctagtgcatcacatgtttatgtctaaaaaattaaatctcttttctactggtgttgtccataactaatgcataattaagccatagcagcgagaagttgagcagaaatgaaagcaccatacctgagccaacagactcttccaatgtgagacccagtttacctctggtcacttgatatggttaaaatgtgagcactagaagcctttacggagcatctagtctggtcactttaaagaccacagatgattggcccaaggttatccagctgcttcatgacactaagaatatgatccacctttttcttgatgataattaacctactagtttgtgtctgtcaatctgcatgaattggggttgttacacttacaggattttagtagcagagattcattattttagagagtagtagaaatcttttgagattaaagagaagaaaaaggtttaggtgcagctcatttgttgattgtttttaataagaccattgaaaatatggtagattattatttttaaactgtgaaagaatactgatattggtaagtttattcatttgttgatttgtgaaagtagaaaaacaaaactaagaaacatttgatcatgtgtaaaatttaatatagagaatacatatgaaggatttttatttctgaaattcttttaattttgcagactggcttaaaatatgctcaaagtaaatttaagtatttgtataaagaaaaatcaaatatacaacattaatcttaaatgaacaatagaataatgcttaacctagcttttcaccatcaactcgaaggaagtctaaatattttaaaacattaagagaagtacctccaaaagaatgcacataattctttcctaatgtgggattagtaaaatattgtaaatctgagagcacatagtagctttggtactatctaatgagtttcaaagccgtcttccaagtttcacagtcatacttgcattatggcttaggagtgaggcattgttgcactgacctgtcctcctccaaagagcagctaaaagcatgagatgtgacatccttggtaaagttcttgccaattgctgacaactcacctggggtggcagtcacctggcttttgcccagcgggcttactttagaccattgctggcaagtaaagcattgtggagctgcctcctgaaatttcacttgcctgtcttaatgttgaaaaagtttcaagtagtttcgctttagagtcactaagaaacccagttataatctgaaagtgaaatgagatttaggtttacatgacccttagagaatgaggacaggtatactgttagatgagacgggattaagtctgtggtattgagctgttcagggtgtttgctgtattatctcaaactacctgtagtgtatttgtaggtatgggtgagagtaactgtgcttggaatagaaaagccctgctgcatcgagacacaatgctggcagctgcggcagtgtacagaggtaaggggcgaccactctttcacccgcctcaccaaggcacttgtgctgtatcatgttgattcccttcacgttgccaatgcattttccattcctgttaaggctccctcagacttcttgtccttcctctcaaaacacagatcctgtagctttttccagacagcctttactatttccttaccctcagtattaagaatttttcatgtaagatgttctcagaatcttacaagtatccttgtacccatttctttttgaagaacatgacctttattgagcagaaattttttcctacttgcattttttcagactttaaccattattgtctttttagaaatgtacagaaatgaagatggttcagtacctgctacataccagatctattacatgataggatggaaatatcatgagtcacaggtaacgttactaagatggatcacttttcttagtgggttcgtgttcagattattgtttactaacttgggggaaggggtaatgtaagacagcattaagggctttaattggggctgtgtattatctatctatttctaatatctttaatctttattattttcaggcaagaccagctgaaagaggttccgcaactgtgtcatttggagagctaggaaaaataaacaaccttatgccaccggggaaaaaatcacaataaatatttattcagtgttaatgtcgtccagaattttcatcagaaatggatagctttaacatctaaaattattatattttgaagcaagaagcactctaagctatttactaataggcttttcatataattaggaaaacctaatatcacatctatagtaaccatttcagtttcatattgtttctgttctcataaggatactgctgagtgtctttgcagattcagcctaaaagcaaagaaaatatttccctaaaatatttgcaaataatgttcacatatgtaaatgccttggaaaatattactcatgctgaccttttacacctttttcatttgtcatactgttttctttgccttgaagaggaacagatgaatatgcaccttctccagagttatgtggttttagaatttagaagagcatgtatctttattaaatccctcctcaactctttttttttaaagcatctgaatttaaccttatttcttttttatctccatggtgtgggtgggaccaccatggttttacaccccaccctaccttagggaagaagaaaacattttaaagaataccagaagtagaatcacatgtaacagtctctgcacagtcatcagtttattgttaagctttcctttgtaatttcagggcttaagcactattatcctaatccaagttcacagtcctgttgttgtcgaggagggttcaaaatcatttggagataatcaagctcagacagcttaggataggtgagaagaacatagaggaagcagggagaaggctgagaagcaagcaggagtgagcgctaagtgttttgtttccagttagctgttcgctgtcttttccatttaacctgggcactgccctagcctcatcttcagccttcagtgatctataatagcatttccttctgtctcctctcagtctctcttctgccttccttccctcctttactgtattagcaacaagctgtccatgggtgggggctgtgtgttagcctgtacgtagcacatgggactttccacatagtagatattcagttacattttgaactaattatataacaaacttgccctttgaaagactaagttatagttaaaaaccaagatttgtaggagaaaaagaaattattgttcccttcagtttgaaaaatcatcgatatttgaaactgggatacgcttggtagcttttttgttttaacacaaagtaaacctgtgaagtagaatttggcgttttgttttttggggttttttttttttttagcttaattttcagaacttgaagagagagaacaacaacaaaaaacaaactgcgctagccaggtgcaatggcgcatgcctgtagtcccagctacttgggaggctgaggcaggcaggagttcaaggctgcagtgagctgtctgtgccacggcactccaacctgggcaaaagaggagacctcatctaaagaaaaatccaccaaaaaccctgtgttttaaagtgcaaactgatgatggaggaatgggtaaattccaggggtctatatttccaaaaggacatgtgtttttgtgcactaatacttgtttttgaagaacacatctcagtgttaagtggctgttgctgaggaaggggactgaggaactgggtgtgtctgtgtcattctgtttgaatgtctgtcaggggtatagaaactaggagggagacttgtacttttcactttttaaacttcctgtaaaatttgaattttccaagcaagaatattacttttgcttatttaatgtcaacggaattatatgtggatggtggggtggagctaaggattactctactctggctatcccaaaaaaagctccatttgtttaaaaaaattaagtaaatcaaacacagctaattgaggacccttattgtttaatgtgagtgattgtagtgaaaacacttattttagtgtgtataacactagtgaaattatttttgtagttaaatctgctggaagtgtgctattaagcttttattgtttggagccctcaggaaactaatttttctgaataaccacattttccaaatgattaagagctcatccttttaagcaatgaaacttttaaaaggtctttatcaaaaatttttcataaatgttacattcttaaatggtatatgataaataatcatcttttttgttggtttatttttttattttttattttattttattttttgagacggagtctcgctctgtctccaggctggagtacagtggcgcaatctcggctcactgctgcctccgcttcctgggttcaagtgattcttcctgcctcagcttcccaagtagctgggattacaggcgcgtgccaccacgctggctaatttttgtatttttaatagagatggggtttcaccatgttggccaggatggtctcaatctcttgaccttgtgatctgcccaccttggcttcccaaagtgctgagattacaggtgtgagccaccaggcctggccaataaccatttcttgataaccccacagataatatcataaactcaagttgtctgtattgcttcttcccagactggtcccaagaatgctgtggttggttttgtgtcttttccagcacttttcttacttgctgtcagttgtcaatctcaacaccttgaccaaaatgaactttcttgagtcatttcttctctgtttagctataagattagaattcatactgaaagatttctaggacttttgtattaaggtaggaaagaggaactaggttctgggagaaagactcctttggaataaaattcatgagctttattggttcctttaacagatcttcattgagtttcatgtgccaggcatccaactagtctctgcttttatagttgtcagtctgacagggctctagtatgtgcacaccgtgacacctgttggctgccaggagactgtttggcttatttcctggttcttagcaatattccaggttggcctggagaattccaaaggtaaatatgaaaatgtatacctacaaaagaatttttgctttataggaagaatttgtaggatttattgagatgtaagctacctatatacatcaagtatgtgatatgattgtaaaaagttacagaagtgtgtgagtcatgaagtacctgtgagggaagtttatatattttttcaaactcttttagtaccattttcatccactaggtggaagcaattacagtatgacctgcattaaagacatgtacagttttttggccggctgcagtggctcacacctgtgatctcaacactttgggaagctgagacgggaggattgcttgagcccaggagtttgagaccagcttgggcaacgtgatgaaaccctgtctctacaaataaaaaaaaaattagccaggcatggtggcacaagcctgtggtcccagctactcagaaggctgaggtgggagtattgatcgagcccaggaggtcaaggctgcagcaagctgtcgcaccactgcactctagcctgggcaacagcaagaccctcgtctcaaaaaagaaaaaaaaaaagtacaatttttgtattgattatgtattccttaagtaggagtggaataaaagtattttaccgtggattggcttctgtgaaggaaagaagtgaatattagtagatatttggaaaaaagaaagatagttgatgcagtgattattattctgttcctttgtaagttaccattagcctctcttgcttaagaaatattttgagcttttttggggaggggttgtggttaatgatgtgaaattaatcttcaggaaatttatcataagcagacttgccttttcagatattggtatattttaattctctacctgaatacatacatgacagttattttaccatgctggtttaaaaaacatcaatttgaaaatactagaaggtggggtgaacactgataagttactgttaacaaataagaaaataatgctttgccatctgtggtggttttaaaatctatccacaaatttttgatatgcttctctttaagacgggacacttcattcccctctaagtacaggctgagtttagtgattcccttccaacaaatagatggtgtgtcacttctgagactaggtaataaaaggcattgcatcctccttactctctcttggatccttcactctagggaaagccagcagccatattgtaaggccactcaactccatggagaagacctagaagtgaggagcagaggcctccagccaaaagccatgtgagggagccatcttggaagcaattctccaggcccaaacttcagatgactgtggtcccagccaatgcattgaccacaacctcatgagagaccctgagctagaaccacctagctaagccactctcaaatatcttatctacagaaactgagatgataaatgtttgtggtttaagcaactgtgttttagagtaatttgttacacagcaatagataactgatacgcgatacactgtcttcaggaggtgtattagggtgggcaaggtattctgagttgttattttcagcataaaacatagcccccttatttacaattaggtaaagttaacataaactgtattacttttgttctcagagaacaccagacctgaaatgctcttgcctggaggtttgattccatgatatcttgaaatggaactaacttcccacattaagtttagtaggcctcaaattttctttcctgggaatattaggataaattttttggaagcctcgatgggctaatttccaaatgaaatcagagaatttgggaagaccatgagaattcagtgagctacataactgcacacagattcttcagccagttcccttctgccgtagctgttgagttgcgacagctcattaggatggactgttgacactgcatacttgttaccaggctcacaaatgagtacaaggatgtggaaataacaaggactctttaaagccagacttgatcgtacattgttagtcactgctaaaaccaggcaaaagtaaattgcctgcactttgaaagtggccattgtaacccggccagtgtctagactcttcattcaggaatcacacgtttggccaggatgcccgttgctagttctgtcagaacaggtctggtggtagaatatcaggaacacttaccaggtgtactgtttttgtgctcagagtgtttgtgctcagattgtgagtgggagattgggaagaggagaattccaaagaaagacttgccagtctgccataaaaaactatggaagtcaaagaaaggtcggggactgggagtcaggtggtctgggtttagtgctggtcctgtttgttcctaatgctggggcagactccatctctctgacctcaatatcttcatctgtaaaattacaggtttgctaattggtgagtctcaaaggaggctaccagcctgcctttcacgttcctgaagggctttttcaaacacttccacctttctctccttggttgagagtcacagccagagggagctcatgttagaggtgggaaatggttgcgagccattggacaggatgatctcagaggagcttttcagcctgaccccagaacctgggtcccaaggcaaagtggacaggaagccctcccatctttacagtttctcagactctgttgaccttggggacttcttttcccttcaaagtagactttgacttcccctgaggataagatttaagaaggaagcacagcatgatttactttgggtcccttaatctttaaaaagtgagtcagcatgctggggttttttgggtttttttgtttttgtttttactcctgggcttaagctcccaaggagctgggcttacaggcatgtgccacgatgcccagctcaataatgcattttgttgttgttgtttgagacagtcttgttctctcgcccaggctggagtgcggtggtgccacttcggctcactgcaaccgccgcctcccgggttcaagtgattctcctgcctcatcctcccaagtagctgggattataggcctgcatcaccatgcctggctaatttttgtatttttagtagagacagggtttcaccacattggccaggctggtttcaaattcctgacctcaggtgatctgcctgccttggcctcccaaagtgctgggattacaggcgtgagccaccgtgcctcgccaaagaatgcattttcatttttaagtttctgggtcacaaaggagggccccagacccttatatgtccagcatggatagccttctatattttccatggaagatgacattttctcataggcaccaagcattcagcatttgggaagtgtcccttagttttgcacaaagttcccagttacttgtctaggtgacaagtcctggctgcagaacaggaaatgctcaggcttcaggtggcagcactctggagggccaagtgaagaaatagatacgaaagtactggttgtccatgtaatttcctgaggagccagctgaacactcatggttctccacaaaggaggcttctttgaacctgtacacagttgttacggattggtaaagccctcttgaaggcgcccttactgtgctctcaccaggcagtgtgctaagccttagatatccattctcaattcacatttcatcctcagttccctatgagatattagtactattgtccccatttgttagatgaggaaacaggcttaggttgtgacttctccaaggtcacataagtgacagagacaattttgacttcagtcttgtatgtgaagggaacagtacaattaatgattgtagtgtgctgccttctttgcaagtcaaaaccttctgtgagctcccagcctttcttcacatcctcccttccaccatacccttgaacactccagccgcatattagaaccagtcaggtgattgcacccactgtctccaacacttgctcagccccgtccttgaatccttgtccctgcagaactgcctgcactccaaactcttctgggtcccttctactgggagctgtcacccttcatatccagctctttttttgtcccaggccatcttgaactttggttagttccatctcctttagcactttgtacatcatttcctgttcatgaattctgcctcttcagctaactgtttagcttccttgagcattggcactgcaataaccagggttccaacagccccagggaaagcccagatagagtcactatgacccctgtgagcacggcacagcaggagaccggaagaacaggcagctagcatcaggcacgttcagctgcaaattctaaggatcagccactcaattgggattcaaagctagactcctatctcagaggaatctgggtcccaaggaaaaagagacatgcatgtgaatgatggggcagaaatacaattgctgggactgagagacagggaagggcctgactttagagagtaagcctagaaccatgatgtgaggtcaaagcagggcctgcagcgcagctgacggcattatgtcatggggcagggtagattcccatccagacaagatgttcacctattattagatatagggtggcccagtggagtagtggctaagattagcatgagttctgaagtcacaccctcccattggatcccctttctaccactaactagcgtacctgtgtttagttactcaactgctgtgaaatgagaaccattcttcaaagtatcaatataacacttagcaggtaaagcatcacacttcttaggcttaggaagccaagctcattagatgccttaagtgtctggtacaataactcttacatttataggtgttgcaaaagaaggtagaggtggagcacaggagatggagaggagaatttccagaggtaaatgtggttagcaaagctgaggtaagcatgtggatatctttcctgtaaggtttcgcagaacctttgatgtaattctgaatctcccaaagcaggctaaattttaggacatcttccagacttaatggtccagtaacccttttatcaaggaggatcaagtaagaccttgaactcgtttggggaaacattagcctagcacaatgctaggcattgtacaggcttgttaaataatttgaataattctcgaaaaatctacattcagttatcagaatctgttcacctgcaaaattgtttatgaactttctcaaggcagtcaatgcaatggttaagtactggctatgtggtcttggacaagttacttgacctcagcttcctcttctgtaaaagagggatgatgggcctggcacagtggctcacgcttgtaatcccaggactttggaaggctgagatggtggcgcacacctgtaattgcagctactcaggaggctgaggcaggagaatcgcttgaacccgggaggcggaggttgccgtgagccaaaaaatcacaccactgcactctagcctgggcaacagagtgaaactctgtctcaaaaaaaaaaaaaggaaggatacagtattctcccaggaaggcagttgtgaagatcaaatgagctaataatacattcagtcagaacagtgcctggcacataataagcatgatatgttagctattattattctagacagaatgaatttcggggaagctcttaagaataaactattgactgctgttgtagtgctagtttaccatttgttctgcattcaattccctcttgcttacttggaagactgattaatagacaggtactgcttaaagtcactgtccctttttaaaaaagaataaatcacttgactcagacagctattttgtttctatggcaaagtctaaatagaattcaaatataagaaattcatttaatgctttattaggtgaagattgaacatattttcttttagaggcacttcatctttacctagaattattttctgattaatgaaaatacaagttaggataattcatttcacaccagtacacacctcaaaaaacaggaagtaaatgtttccatattgatacaaatgctggatgaaattaattaggtggccaaaaaacagctaagaattcaaatctcacagcctaaaaaataattctattcttgccacacatgaaaagattttttaaattttttgttatagacaactataacaacacctcttaacacctgagaggctagagtgaattataaaacttttgagctataggacattagagcaatcttgctttgcaaataaggaaattgagttacgcagagagggaatgacttgcttgaggtcatagctaggggtggagagagaggacataggtgttccagtgtcttgcccagaaatctatggcaggcttgacagttacacaaccccagctcagccacaggcccagacagtgcacctgccctcctcaggaggtttagagaaaggtatgaaggttctcatggtcccttggggagctctccattccaaagacctccagtgaggagtccttcacaaagtccagagtcaccccacattgaatttgtttagagcaaatttctgtgttgcaggttacgacagacctcaatgggctgtgtgttgagaataaaaacaaaaaatactgttccctgggtctcactcccagagattctgattaaatttggcactgagagttttaagagctacagcccctgctccagagcaagagttttctgagcagagaaaacttctacgtgaatcacagacccctttttacctccccaccacttctgttgcagtcaggaattttgaagaaccgctgctgctgctgttgtgttggttctggaaacacgtgtgtcattgcacacttcacgatggatttacattagagagggaagttgtgtcagactggcctgggagtgaagcagggtgggtgtggacaagttcttcattcagtacttattgagcacctactatatacgaagctcaccgagagatgagaggaacctgatcactgccctcacagagctcacagcccagccaactagagaccacggggaagctgacattgtgcgttttcttgggaccaaaaatactttgattaaggcaccgatgtggaaggcacggtgcaatgctgatacttggataaataggacagggtccctgccttcattacactggtataaggtgacatgggcagtcaaccatagttcaaagtagaatataagaagtgccaggaaagatgtctgaccatgagccttacgagttccaaggaaagtgagtgctgtctgtgtggtggaacaggtggtatcaggaaagacttcatccatgttttcattcattccacccaaaccacaccatgccgggtgctggagtgtaaggaggaagaaaccccagccattaagaggcctccagccaagtggagcagaacaacaataaacaatacagtatttcttcaattctaagtgccttcgactgcaaattgtatcctgattttggagatgttaaaatttggaaaaaggtgtattttagaattaatgaaataaaggagtaatagataactcagatgcttactatctaccaggcactgtcctaagtgcttatatgtatcactttttacttatttaataaaaggcaattacatgcagtgacaagtggcttttgggaaacacagtgaataaatgaggaagtgaatgaataaatattagaagaataaacccttaataaaccctttgtcttccatccttagaccatctggataaggcagttcctggtctaagaatttagatccttacaaatggtaatttccaaactttagtgttgtcaaggaaaccactaagagatagatatagatagctcagtaatgatcccattccttatttctaacaagtccaaagaagcagtggtgtgtatctgtgtgtgtgtgtgtgtgtgtgtgtgtttgtgtgtgtgtgttgtgagggagaagggagatacaaagaattaaaaaactgtcactcacaggcaaggcacagtggcttacacctgtaatcccagcactttgggagacccaggtggggagatcacctgaggtcaggaatttgagaccagcctggccaacatggtgaaacactatctctactaaaatacaaaaattagccgggtgtggtggcagtcacctgtaatcccagctactcaggaggctgaggtaggagaattgcttgaatccaggaggcaggagaggtggaggttgcagtgagcagagatcatgccactgcactccagcctgggtgacagagcgagactctgtctcctaaattaaaacaaaaacagtccggatgcggtggctcacgcctgtaatcccaacactttgggaggccaaggcgggcagatgatgagatcaggagatcaagaccatcctggccaacatagtgaaacccaatgtctactaaaaatacaaagattagctggatgtgttggtgttcacctgtagtcccagctacttgggaggttgaggcaggagaattgcttgaacctgagaggcagaggttgcagtgaactgagatcatgccactacactccagcctggagacaaagtaagactccatctccaaaaaaaaaagaaaaagaaaaagtaaaaaagaaaacaactattactctttttaattattacacagagggcgaatttcattttaaaggaggttgccattgcaaattgtgagttcctgaggaaaacaggatccattaattgcacttaatgttcggtgatagggtctgcaggtaattggaattcttgtcacgggacccaaaaatcctactttaaaaacagctctctggatgattcttgtgtacactagattttaagaatcattaattttgtctcagtctctgaaataaggaggcatatttgccatacacactaatgagacctaaatagggactgggatttcaggatgcaaaacctactcaaactgctttgtctttctcccatccctccctcactgtgcttcccagccaagtaaatcaccagcacccaagttcttatcccagggtcagcttctgggagagctagaactagtacagggagtttgaccttattctgaaggcaatgcacaatcactgaagagtatttggctttttgttttagagatagggcctttatctgtggcccaggctggagtgcaggaacacaatcatagctcgttgcagcctggaactcctcagctcaaaagggattcccctgcctcagcctcctgagtggctgagagagactacaggtgcaagccaccatacctggctaatactgaagagttttaattgagggagtggcaagcaatttcttttttaaaaagatctttctgggttgggcacagtggctcacgcctgtaatctcaacaatttgggaggccgaggtgggcagatcaaccgaggtcaagagttcgagacagcctggccaacatggcaaaaccctgtatctactaaaaatacaaaaattagccaggagtggtgacaggtgcctgtaatcccaagtacttgggaggctgaggcaggagaattacttgaacccaggaggcagaggttgcagtgagccgagattgcatcaccatcctccagcttgggtgacagggtgagactccatctcaaaataaataaataaataaaaaagatctgtctggatacagtgtggagaatggaatcaaggagacagaacatttagagtaacaagagcccaggggtagaggtggaggcagactgcacaggggtgaggaccatggatgaggattgaaagggagggtaatcaataggccttcatgattgattgattgcttggaggtaggggaaggatgggagtgctggatgaaactgccctgggagaatgtacagactgaggagaaaatagcgcacaaggagaggtcttccttcccatttgagttggctcttgaaagatggcgaagactttttagaaaacattttttcttagccaggcgcggcagcatgctcctataatcccagctaattgggaggctgaggtgggaggattacttgagctcaggagtttgaggctgcagtgagatatgatcacaccactgcactccagcctgggtgacagcaagactctgcctctttaaaaaacaaacaacaacaaaacaacaacaaaacacgtaggtagaaaacatttttttctaattacccccaccatcattataaaagttattcatgttcactgtgaaaattttgggaaatttttaaaccctataataccatcaacgcctattaaaatatcagtgtatatcgctccagattttactaacagctagctacctagataataaacatcaaatcatcctgtatactgtatggcatcctgccttcttcaataatactatgctatgggcatttttctgtcattcttttttaaaaagtatgatttttaatggctacatatttcatcgtgtgaatgtaccacacattatttgatgatttctatttttaggactatgtcttttccaacctttttcccattatagacagctacatgatgagtagaataaattactaggactagaattgctgaactaaagtatgtgaacatatttagggctcttgatatttattatcccagaataattatgcctctgtacatctcatactaactgggtaggtcagctccaggagggcaggggtttgggtctgtattggtcattgttatatccccaggacctggaaagttcctggaccctaacagattttcaataactactgaatgttcaaaaattatgaatgaacaaagagcaagtgaatgaatgtctcaccataccctcactatactggttataattatttattagatctttagcattatattattgttttcattgcttggattattaagtatcagctcacatgctttcctgtggaaggatagtggctaactttggcatttgatgagaaccaagttcaaatacacttattagctgtgtgattttgagtcttgcttcactactccttttcaaatggacatgatagtagtatctcccttacagaatcactgtggtgaagaatgatatatgcatagactactcacagtgtctgtaaatagtggcacaaataaatgttgcatatgtgttaaatgatttatattttcacatcccctgcccatttttttttctagttcatagtttaagtgttacagtccttaactcactgacacatttattatgacatttcccctcatttctgtcattttgtatatggtggctttcttaatgttccaaaattttattttatttctaccctaatctgtgcagcttttcctttctgatgactttcattgctttggtgcttaaaaattatttccccacactgggatcttaaacattttttttttttaggttgctttaaattttttctagccttttttaaacggtcctgcacaaaatggtttaatctattgtttgtttttgtctatggtggggcatatattaattagactagcctagattaggcagcagttacaaataaactctgaaatggcttcgcacaagaaaagtttatttctcattcaggcctagtctatgtaagttggggaggggatcaccatgtagtgactgggagatccacacgccctccatctggagctagcgctttctcatcctgtggtttctaagttcttagcaggaaaaaagaagggtggaggaagcaaacaccagctttcaactgctttgcctttctagaagtgacaaataccacttgtactcacagttcattggacagaactggttacctgggcccaacatagtcaccaggaggctgggaaatttaggggagcatgtggaatgttgattaatgagcacccactgtctctatgagagggggtgagggaataatccattttttttctgaaattatcccaggatcccttttcttttaagttagagattattaaaagttacggtgaagtttaaggaataaaataacattcatatcccccaaaccctaacttaataactgttaagattttgtcatatttgtcaccatttattttttattacagcttggagatgccatttgtataccctaaaatttgcccttttatagtgaacaattcagtggtttttagtgtattcacagagttgtccaaccattaccaatatttgatattaagacatttttcgtcacttccacaagaaacatcatgcccattagcagtcattttccactccccatcaacccctgggccctgactacaactcatctaaattccttctgtctctgggaacttacctattctggatatttcatataaatggaatcatacaatatgtggcctggcttctttcacctagcataatatttttaaggttcatccatgatgttacatgtatcaatacttcattactttttattgctgaataatactccattgtatggatataccacattctgtatatccatctgttgatagatatttaggtcgtttccactttttgactgttgtggataatgctgctatgaatgtttgtgtacaagtttttacgtaaacatgttttcaattcttttacgtgtatactaagcagcagaattgctggctcatatagtaactctatgcttaattttctgagaaactgccagactgctttctacataatgcattctgctgttattctataggtaactattaggtctagttggtttgtagtgttgttcaagtcctctagttctttatgatcttctgcctagttattctatccattattaaaaatgggatattaaacaaatgttgttgaattttctatttcttcctttaattctgtctgtttttgcttcatggattttggagttctgttgttatatgcatatatatttataattgttacatcttctaataaatttcccctctttcattataaaatgtcccttttctctctaataccttttttttgtcttcaaatttattttgtctaatactagcatagtcacttttgtccttttggttactgtttgcatggtacaccttctttcaacttttactttaaacttattcatgtctttgaatctagagcatgtttctcgtagacagcatatggttagattatgctttctagaaaattaattctgccaatcccatcagagataatcattgtgatgaaacatccattttcactgtgatgaaacatccattttcattctgcatttgcagaattttctaacatatgacctatatagatacatcttttttttttttttacaaactgtgaccaaattttataaactgttttgaaatatgcttttttccacatcacaataaaacatggtatttccaggtcagtaaatattattaaatggcatcattttaaattgctctatgttgtcttgactagatgtatgacagtttatttatctagtgtattatttaggtgacttccaattttttgtcattataaataacaccagggaaacagcatcctcatagctaattttatgcatgtatttggttattatttactgtaaatgtcaagaggtggaattgatataaactcccaaaccacccagtctagcctcagcatgccagagtgccagttttcccacacttcagtcctttttttttttttatcagatcacttaaaaataacacaaatgtaaaatgtaatctggacttagggggaatatttgcctcgatggttagtccccggtagctcaataacgtagtctcctgctttcttagtcaacttgatgaagttttaatttaatggcatcctattatggactaaaatcatgaacaggccagtacagggagaaactaagaaccagaagattgtcactgcttttttgaggaacttcagaagaccttatgttaataactgtcccaggaaacaccagccttgggctaattattatgggcctacgtgcacaaagcttttgcttctttcatttttctaggactctagttccctaatgagcgccgaagttctcagcactctgtttccttggtgtgtcctgatatagaacatattgggaagatggcttggccacaagctgctcttaaactacaaaatttgtgcctggagcagctgaatttgtttaatcgggtcaaaaaagggcttccccattctagattgtaaaagcaaacaaagtccacgtttcttgtaatagttttacaggttcatttatttattacatttaaatctttgcttgtgtgaaatctctttcaatgaaacttgtgagatagggatttgaatttattttttccagtgggctaccctatactacaatacaattctggataacctaccattgcccctttttgttttttagagtcaggatctcactccatcacccaggctggagtgcagtggtgcgatcatagtgcactacaccctcaagctcctgggctcaagtaattctcctacctcagcctcccaagtattaataggtaggactgcaggcatgtgccatcatgcccagctaattttttaaatttttgtagagacgggtttcaaactcctgacctcaagcaattttcccacctttgcctcaaagtgttgggatgacaggcgcgaactaccacaccctcccttctccattgatttgaaatgccaccttatgtatttgggtcatttctggatgctctatgctgtcttattcaaatggattaattatcatagctttatattttattggcttgtttagctatttctttctcattactctccttttccagaattgtccttgccattcatttatgtttatttttccttacaaactttggaagcaactgacctagtttaaaaagcactttgttggtatttttattaagaatgtattattattattattatttttgagatggagtttcgcttttgttgcctaagcttgagtgcaatggtgcaatctcggctcactgcaacctccgcctcctgggttcaagccattctcctgtctcagcctcctgagtagcttggattacaggtgcgcaccaccacgcccagctaattttttgtatttttagtaaaaatgggatttcaccatattagccaggctgatatcgaactcctgacctcaggtgatctgcccacctcggcctcccaaagtgatgggattacaggcgtgagccaccacgcccggccaagaatgtattatatttaaagattcattttggaaaaattaatctctatattttggcactgtcctgttcgaacacaatagtatgtttccatttattcaaattttatagatgattgtttacattattacatcatttcatgtgatattatgtaataagaagcatatatttggttttcatccctggttcctggcacagagcttctaaaattctcatactttcctaagtgattggggtgctgggtgtcttttactctaatatttggtcattgaccccagttctggttcctgacaaagagctcctaaatctcttggaatttcctgggtgatgggagcatcttttgttctaatcaggtgactcttgatgggctcctggctagcttcaggataggggctggatgccagaaagaccaaggcctgatcaggagcttggaaccttggaacttttcaccccactgtacatctttcaggaaggggagaggggctggagattgagttaataattgatcatacctatgtgatgaagtctccataaaaatccaccaaaggcggcgtcagagatcttctgggctggtgaacacatccatgtgctggggggatagcacaccccaagtccacagagggagaaactccttcactcctccaggcccttccagaactcaccctatgtcctcttcacctggctcatcatttctgtcctttcagtattctttaataaaccagtaaatgtaagcaaatgtttccctgagttttgtgaaccattatagcaaattatcaaacctgaggaggggcttgtggcaacccccaatgtgtagccagggcagacagaagtgtgggcaacctggaaatctgctacttgtgattggcatctgaacaggcagtcagtcttgtgggactgagccctctgatttgtgggatctaaagctaattctaagtagtgttagaattgaattgaaatgtgggacactcagtaggtgtccagagagttagagaattcgttgctgaaaaacctcctacatatttgatgtcagaagtgtcctgtgagaatcgaggaaaacaaagtctgttttctttatttcatttcatatttctttttttataatcctagtcctttctttggcattaattagaataacttctcactttaaccttaggagaaagctaggaatcctcatctatttgttcattaatttattcattcattcattcattattcatttattgtgcaggaacaatgtgaggtgctgaaaacacaaaagtgagcaaattttacagtggcccctgcttccatacccagtgtacaatgtactgggtatgtaaacaaacattgattttattcccaacctggtagttatctctgtgtcttctggaatgtttaacatgatctttccttagactttttcttcttgctataggttccctaaaaagcatactctgagataacgatttgagtgcagtagtttatttggcaaggagtgggaagatgagggagtggaaaagtgggaaggaagaaaaccaataagaatgcgttcatgagcagatttctgcagtgaacaactggggctcaatcctgctggacaccttctgagaaactttacagaatgtactctgcacatcagcccaccaagggtcaaggaaactgttcctgcctgtcactggtggaggggtgctgggagcattaactcccgggcacttctggtctacctttcctgtggccaatagtgctcctgcagccagagaacctccccaggggcagatgtctgaggtagaaatccaaagctggcaaggggcctacccatggaagatgccagtggtctcagaactgggctgaggggacatgggtagggcactggggtatctattccagaggaaagggagttatctttggaaggcatatttacatacagtgggaaggggcagtaatgggagaggaaatcagactgtggaaagttagtgtagctcagaaaacaatcacaatcaattggtcaatagtattgattgatcacaatcaacattccattctgagttgttaataaatcacatagcaaaattgatgatgtctttctgggctttgtatgttggtcaggttttctctaagatgctttgaaacatgaattttttaaaaaagatttttcggccaggcccagtggctcacgcctgtaatcccagcactttgggaggccgaggcgggtggatcacaagatcagaagttcgagaccaaccaggctgatatggtgaaaccctgtctctgctaaaaagtacaaaaattagcctggtgtggtggcaggcacctgtaatcccagctattcaggtggatgaggcaggagaatcgcttgaacccgggaggcggaggttgcagtgagtcgagatctcaccactgcactccagcctggcgacagagtgagactccatctcaaaaaaaaaaaaaaaaaaaagattttttcaaaataaggttgtagattttttgggtccactttgatatttttaatgggaaaagtgaaaattgatagataactacagtgaaagctatgtttgacaataagataataagataacatgggaggagatagcatagaagaaggcgcactggctttggggtggatcctgagtttgaatcctcagtttctccactaactagcagtgtgacctgaggcaagttgctgatttgagccagggtgttcttatctggaaaatgtaacaatgctctcttcatcaggtcgctttagttctcatttccccaggagcagacgctgagaagaaaggctgtccacccccaggagtttgaaaactttaaaggactgcctctggaaatgtgtatcagcccaggactatccctccctcaagtttcctctagtaaaattgctatttttatttttatgatttttcttgttaataacaagctattgttagaatggcatatttattgttgctatgggttgctactttttcttataaaaagaatgtgtcttaaaggagataagtagtttttctatattaattacatacaaacaaaatactcttggccaggcatggtggctcgtgcctgtaatcccagcactttgaagggcgaggctggcagatcacttgaggtcaggagtttgagaacagcctggccaacatggtgaaatcctgtctctactaaaaatacaaaaattagccacgagtggtggtgcacacctgtaatcccagttatttgggaggctgaggcaggagaatcatttgaacccgggaagcagaggtttcagggagctgagattgtgccactgcactccagcctgggtgacagagcaagactccgctcaaacaaacaaaaaaacctctgggagacagaattcgttctggcagagtgaggaatgatgggaagacagaaatgggaaaacttatagccccacatagagcagaatctcacgtggaatccaaggcttgtctcttcaccccttctccaccttccttttcttttctttctttcgtttgttggtaatgatttcttctaaattaaaaaacaaattccctatctgacgtctcaggtggtttttttgtgactgtggaatagagtgagcaaacactatttttaggaagccattacaaacttacagtacaggactttagcctggccacaaacatcacttctttgggctttgggagacttttctgtctaacctcccacaggcagggaggcctgtcttagttcagaagttttaggtgcgcacactgttgacagtttcgtggctttggaattgtagactcgtccagaagctggacagataacgtgaccgaggccacagcattattcctggagcatctggggctgagccatttgctgcgtcccagcccagagcataggtctcaactgtgaaattgttcgggttttctgggtgataaaatgggaccctttgaggcttggtttgggttgaagcccaaaggctgagagttaacaaagagagccaagtggccccaattttataaaatgaggtgctggatgttctgagctggaacttgcaaatggatgggggtgaggggcagggcatttgaaggtggaagtaggagggcagaggccaaattttcctggagttttctgattgctgttgcatttcccactggggatggggagagagagctctgcccctaactttggccaaaggagaggggctataagagagccactgggagagcctcctctgtggtcctagagtgtgggggacagagtggactggggtgtgacacatgccaaatgcggagaggctgaggctacttgcctgaggagagagtgagactagaagcaagacagcaggagaaaccgggctgccctgggagctaactgccctccaccaccagcagcagcaagagtgtgtgttcctcaggaaccaggaaaagaacatagaggagccagtgcatggtgtattcatttcctaatgctgctataaaaaaaattaccacgaaatttgtggcttaaaaccacaggcatttattccctcatagttctggaggccagaaggctgagacactcccttcagaggctctaaggcggaacccatcccttgcctctttgggcttctggcgctgctggcattcctgggctgtggacacatcactcctctctctgcctccatagtgacattgcctcctcctcttctgtctgtgtcaaatctctctgcctcccttttctaaggacacctgtgattacatttaaagcctgcctggataatccaggataatctcccctcttctgtctatgtcaaatctctctctgcctctctcttataaggacacctgtgattgcatttaaagcctgcctggataatccaggataatctcccctctcaagatccttaatcacttctgcagagtccctttctgacatggaacattcacagtttcagggattaggacgtggatgtcttttgaggccattattcagcctactgcaggtagagtcccatccaagagagtctgttcatggaccagtgggtgacctcaaggctcagaacacctcactcatgaagcagatgctttgactgcccagtgattttcactgcagctgcagaggacctttctgtgcaaggcagactcctgctaactgtgcctaacactaagggaaggcacgggttctgcctcagagacatccccgaagcagctgagaaaggatgagggggcagttaatgcaccctgggagcaatccttaaatgacagggaagggagcgggtgggaagtgacccagcctactgtctttcaggctactgtctttcaggcagacaattctgggaggttttctgcaaaccttccagatcctggtagaataggaccctcattgcctacagcagtaactttaaaaccgcatgcttttttatggcttttcatccttctctcttcctcaattctgagtcctgcgatcacttcccaaatgagctacctatacccaaattcttgtttcaggctgtgcttttggtagatcccaagcaaggacataaggttcccagcatggaatccccaagaaagcagcaaaagtgcttcatgggagtcgacacagtgaacttctatgctcagcgggcacctttattggataacttatgtgccagcttagtgaaatctttcctattccttaaaccaccctctcaccaccctcactcccttcaaccatggaggaggcagaggcaggtagggtgggaagaggggaggaaacagggcagaactaaccatgtcccacactcctgtcccccatcactcagggtcccaggctgaagcaggtcccggctgcagcctacttactgcattcagttctttcaacacacggcatgcattcatcagcccatttactctgctcgcatctgcgtttcttctagaggcggaaactgttcatcagctagcatcgatactacgatcctgcttttaaatatcctctgctgacggttacactgttctgaagaagtaatcagatggttgcatggcatgtctataaaatgagaagaagaatcttacctcacagaatgcctgggtggatgcagtgagctagctccaggaaagtgactggcacagagtagatgccctaataatggaggcttctctcttctacagcacacattgcaagcttcctgagggcagctcttccttcctgggtccttggcagagtgcttgggacactgtaagtgctcagggaattgtttattgaaggaaagggtgggagggtcaggaaagcagctcttaatcattgccccagatgctgccagtgccctggccccatcccctcggggcttctcattgctgggaggcaaagctgctaactgcaagcacctgcatccatttcccaagggctttccctgttggctccaccttcctacatggggggtgggaagtacggaaaattaatgttccacttaaagcactgctcaaccaatgactgtgagcagttgtgaataaatatcctgccctcatgtcccttgggtgggataaccatgaggtgcgtgctctataccagagttccccagtgggactgagctctggtgactcacagtggtacctttttttgtgagactagggtctcactttgtcacccaggctggagtgcagtggcgtgatctcagctcactgtagcctcaacctccttgactcaagtgatcctcccacctcagcctcccaagtagctgggactacaggcatgcaccaccacgcttggctagttttttacttttattttttgtagagacaaggtctttctacattgcccaggctggtcttgaactcctgagctcaagtgatcctcctgcctcagcttcccaaattgttgagattgtaggtgtgagccactgcgcccagcctggcaacttttttgataactctctgtactggtttccttccttatttatatttcttgaatataacttaccaaataaactatttgcatgcaaaaatcctcgtctcatggtcagcttctgggggaacctaaatgaagacaaccacatggctgaaatttgaaatgtatatgaggctttcttaagggaggcccttttcttcggaactatgacattgactcctcttcctgcttggtttcagatttctgtataatgtgtggaaggggagaaaattatataatctttttgccactctcataaattcataattgagtcacccttctgaaacaaaagacagatcaacaaaggaaaaacaggtatgcttaataatgtatacatgccgtgtccatcatgggggagaaaagtaactctgcaaagtgactctcaaagcattggctggaaacctgaggctttaagctttgtttaagtagcattttaacaaaaagcaatgaattttagtgcagtgacaagacaaaggagagaacagttccagtctctcaaagggggaaagctgtgggaagatactcatgaagtaaggtctgctcgcaggtttctctggtgtctgctagtgccgtctctaggctgataagtggctatctccagtaagacgggatttatgtcctgcctttaggcaaacaaaggagaggcagagagtctccgtacgtctcagctgtctttagctcaccaatcctcaatattttagggacaaatattttggtttccttcagtgtaaattacttggcctaccgcagattcattccaggcctgtaacatgccagttcacatctgctctgtgctggctggggcaggtgtctacttccccagtttgctggggccaggccccaaggtggcctcacagctgttggaagaatacaggtcctcatattgctgaggagtcattgtcctggtctgatttgcctgctattgtgaagacagtggttgagtattgctacctttctccttggttctcttaataggagtgaatctttttggagactctctcccagtgcatctgctgtgggtcagtgtgttcttttttttttttcttttgagacagagtttcacttttgtcacccaggctggagtgcaatggcatgatctcggcctcactgcaacctccacctcccggattcaagcaattctcctgtctcagcctcccgagtagctgggattgcaggcatctgccaccatgcccagctaatttttgtatttttagtagagatggggttttcaccatgttggccaggctggtcttgaactcctgacctcaggtgatccacccgcctcgacctcccaagtgctagaattacaggtgtgagacactgcccccggccatgggtccatgtgttcttgttgctaaatgatgtggggaacagtacaagacagtgggagagcctggaagaacttggagtaattttcaggtaaagctcattgaagttgctgaaaatgaaacaatgtcaaggtgacattcgtggccagacaatttgtgaaggtttatttttaataatgggagttctgggttttctaatcacttactcgaagataggataaaatgcaatgtaaaattaaaatttgaaaattcaaaaccatgaattttctagaccatgagtctccagtcagtaactacctgactagcaggatggtttggaagggtttttcccacactttaatacctagcccagcgccacccagtgctaaactaataagggggtaactttgatattaaaacccaaagctgggagctggacacactggtgtgtgcctgtagtcccagctactcaagaggctgaggcaggagagtcacttgaacacaggaattccaatccagcctgggccacatagtgagaccccatctctaaagaaaaaagaaaaactgggaagaagtagatgctctttgtgcataataaggcttagggaacacatgagcataagatcgaccatcacagttcacgagaagttcaatttatttatttgatacattcccatctagaggccagtccatagtgagggctgcttttctcactctccactccaaggatgcacaatttcctgtgttcccccatccagcagcagaaccctagggcagaggatggctgacagcaacccatgctaaaggtcatatccccacaggaggacctcagccaggagctgaggcagaggagctaggcttatggggactgtgggttcgggaacggaaattgaatgaggatgggaggtggttgagagggtctggggtgtgtctcccacccactgcgtgtcaggaatgaatcttgagacacaggagtggagcctgcacctagggtgccccagacagagagtcccaaccatgctgggactctgcatctcttggctcatgtctcttgagccaaagcaaagaactaagcattattcaagagtgtgtgtgtgtgtgtgtgtgtgtgtgcgtgtgtgtagcggccaatgtgagggtgtgtgtgtgtttagctaaggaacagaggaggacatctcttcccccctccacttaccttcacacatctgcatttcttcagtctgaaaggtgggaagatgaagagagccaggcacgcgtctaactgggctgtctaatccttgttttccaaaacaggcagctcaggcttgggctgcattttttttctgccaatttttgtactgtaatttatgtaaccattggtagatttttaaacagtatcttttatagtaggttaaatatggctgcaaattctttgctacttctctcactgagagacggagtataatgcctgactaacggaacatggtggaagggatgttctggaacttctgaggcttggtcttagcaaagctgtggcttttgcctgtgtctctgtgaacattctctgtgggaatgctgagctacagtgtaaaaagcccaaatgctctgtccaccatgccaagaggccgcatctgggatgtgggtatactggtcaacagtcactgctgagtgagtaaacctgtcttggattctagaacagcccatccactaagtgaccagaagaatcacctgaccacaccctgcccaaattcctgacccacaaaatcttgagataaaatgaagtgattgttgttttaagaccctaacttttggagaagtttgttaagaagcaagcaataactggaaccgtaacatagaggaaagaacatctgtggtgttagatctggactcaaatcacagctccattatttatcagctacgtgatcttttctagcttcttctggcctcagtttcctcctgtgttaaacagaggtcattctagctacctcctagcctcatcatgaagatgaaatgagaaaacagatggaaacagagcctggctcatagcaggtgcttcaaaatgtttctttcctctcttctcagcctcaccatgccctcttctctagggctttctgggatgcccagtgaggggaatgcagcaaactatatagcacctccactactcaagattttggagaaaagaattccaggagaatgttactgagaaaatgactctggacccctgctccagagaaacaaaattatttacctgacttgcctttgaaaaatggatttacttgaagagctactccaatttaatgaagaattgggggaggaaatcaagggagtcacaaaagcaaattagattttttttttttttttttttttcctgagacagagtctcactctgtcaccaggctagagtgcagtggtgtgatttcggctcactgcagcctccgcctcctgggttcaagtgattctcttgcctcagcctcccgagtagctgggattataggcgcccgccactatgctcggctaatttttgtatttttagtagagacagggtttcaccatgttggccaggatggtcgcgatctcttgacctcatgatccgctcgcctcggcctccccaagtgctgggattacaggtgtgagccactgcacaaaaccaagaattagattttttaaaaaacagataccttgggccaggctcagtggctcacatctgtaatcccagcactttgggagcccaagccgggcagttcgttggaggtcaaaagttcgagaccagcccgggcaacatggtgaaaccccgtctcgactaaaaatactaaaattaggccaggtgcagtggctcacgcctgtaatcccagcactttgggaggccgaggtgggcgggtcacgaagtcaggagatcgagaccatcctgaccaacatggtgaaaccccgtctttactaaaaacacacacacaaaaaagctgggtgtggtggtgcgcaccggtagtcccagttactcaggaggctgaggcaggagaatcacttgaacctgggaggtggaggttgcggtgagccaagactgggccactgcattccagcctggcgacagagtgagactgtctcataaaaaaaaaaaaaaaacaacaaaaattagctgggtgtggtggcgtacacttgggaggctgaggcagcagaatcatttaaacctgggagacgggggttgtagtaagccaagatcgtgacaccgtactccagcctgggtgacagagaaagaccccatctcaaaaaaaacgaaaacaaaaacaaaacaaacaaaaaaactagatatcttgtagcccacaggctatccatttttattcaaagcatcagaagtaagaaaatgaagaagggctctgtgtgcccatagagtgggtgggattttgcaataaccgagaaacatcagtggctttcaggcaggaggctctctccctccctctgtcagtcatctcggagatgtccagaggctgcaagatgcccaaccatgcacagaggtggtgagaaccgctaccgtggcggctccaggagaagaggcccagaaatggacatttgaatgattgaaactgcctaaagcactcctgctttcaaagcttgctccatgtctcacattgacatggaacaattagctgaaatgggaaacatatcaactcaggctgccctccctcttatatttcaggcagtgttctactctacacagcaagtccccaaacaggtctccctttctttcctgcctgcagtcactcccagaagtttacctctaaggagctcatgttcatccagactttgaggcagggctcaccaatgctgccttctgcgctcccctctctgttctcatcctggtccttaatgtgctcacattcctgacacctgtgagatgtcatagcatggctgccctctccatgacgtcctgacctgagatttggatgctgccccttcctgcacatttctataaactaggctgcatccctgggaactggaactccctaataagtcagggacatgacccccaaattctaaacacttggacctcagaatccaccacctggattcgttcctggccaaataaatgactgtggccagtatgtgtgtgtgctatatttataaagcacttttgatgttaggtttatttaagcttcacaattcttcagtgaggtaggaaataatcccattttatggaggaaaagctgagatttggaaaagttatccccaaagttacacagctactaagggacagagctggacttcaaatccaagttgtttgatcccaaactcagtgcatgtccaccatttcatcctaccttttgattacggttgacattataaattaaattttcatgtccctaaattggatttttaagtaagcaagcaagatctcttcctacctaagcacctagcacattagctggagaactaactgcaaagcgctgaagccacacagattgttaccaactcagctctctccccaatggatttgccatgagttttttaaaggatattaaaagttaccaattatggaactcattctaggtgccaggccctgtgccagtctctttacatccattatcccacttaatcttaatatcagttgtctaagataggcattattcttccctttttgcacaccaggaaactgaggctcaagaagtcaaatattggctgggtgtggtggctcatgcctgcaatcccagcacttttggaggatcacttgaggtcaggagtttgagaccagcctggccaacatggtgaaaccccatctctactaaaaatacaaaaattagccgggcgtggtggcaggcatctgtaatcccagttattcaggaggctgaggcaggagaatcacctgaacccgggaggcagaggttccagtgagtcgagatcttgccactgcactccagcctgggggacagagggaaattgcgtctcaaaaaaaaaaaagaagaagaaaagtagaagacgaagatgaagaagaataagaagagagaaaagaagaagagaaggttagagaaaagaagagaagagaaggagaaggagaaggaggaggagaaggagaaggagaagaagaagaagaagaagaagaagaagaagaagaagtcaaatatctggagaagaagaagaagaggaagaagaagaaaaggaagaagaagaagaagaggaagaggaagaaagaagaagaacaagaagaagaagaagtcaaatatctggagaagaagaagaagaagaggaagaagaagaagaagaggaggaggaagaaggagaaggagaaggagaaggagaaggagaaggagaaggagaagaagaagaagaagaagaagaagaagaagaagaagaagaagaagaagaagaagaagaagaaaatacaaatatctggagccgggatttgagcctggcccttgacatatgtcctaggcctcttacactctccttaccagcccctgtcccttaggcctgggcccctgatttgcctgtcagagaagccagagaatctgggccttttagctttcatcctaggaggcttgaataatctccttctaagggggtactaagggggacgccccagggagaacagggttctgatgagggatggaggagaggggtgtgatgctgtactggctttgttcactaacacagctactaagggagctttgagagaggcctctcagtgaagagcccgggtcaacccccattccctcgttcaggtacgacatgccctgggaagctgtgactcattagggctccagagtctctcacaggtcattcctataggatgtgcttgtacaaggtctatttgtatatttgtgtctttatcatattctgagggatctggatttctgccttctccaaactcccccttctcttcaccttagtttgtctgtaggagtcaggaaacccagtgcgtcctcttgacagaggggaggttgttctaacaacatgaaaatgggtggtctttattcataacgtgggactaggtcaccaagatgacagattggtaacaaggtcttaggtgaccagttcccagcatcccgcaaagggttttctctactaagcaggaagtctgaagttgtttctctaggatggtccccaagtcttgtctgtttcccatcacagccctgagcgggaaactgcagcggactcttgatttggatgggaaactgtttatttagtggggataccttggagtgaactgattcccgtgagcaggttttcctgtgatccgcatcctacccatggtgatttctaagcaacaaaatcagcccaggaacaatgaggccaatcacaaataagtcccagtgtggtccaatggtgttgtccagtttcagccagttccatctcgttgtgaactgctggcaagagacattctctcaaaaacaatccaagcttcccacctccactcagagccaccatctcttcccaaacccaccaccaccaaccctcctcccacccattccctttgcttccttcagtcttggaagacacaatcttcgcttgcttacatcttccacaaggggcttaaatagcacctttagaataaccccaaagatttagacactttactttttttcaaactgtagctgtttgtggtatcccttgccacctgccgtctgcctaccagtctcggctattgatggtaagaactgttttgaagaagtatatatagcacatgtcactgtgcttaaggctttgaatgtagtgtgtactggaaaagaacatctgctgaatgaattaattgcttatactctgaagtgtcaacacatactcaatagaacatgcagaattactctgcatggcaagtgtaagactctgaattttacttctcaaaggaaagccagtccacaagagactccctgatgggccttgtcactttgtccctaagagttgctcactggagactttcagagattcaggacctgttcaagacaaacttacattaaaaaacaggatatcccggagcaaatgcgtagtttccagtttcatgacggcaaagagcacaggtatgtgggcatctggactcgtttgagcagccatgtcgtacaatcttctggccaagtgaatgtcctagaaggagaagaatagccctacccatcagattctgtaggggtaagtaaacagacaccattgttcacaatatcaaatgtaattaaggttacaggtcttaagatagggagattatcatggattatccaagtggacctcagataatcaaatgaacctttaaacagagttatctcagggctggggatggaagaaagagagatgtggtggagggagacttcagattgattctcagcatgagggactcaacttgccattgttggaaggggccacatggaatgagaaggaatttggacagccaataaggaaacaagaaccttggtcctacaacctcaattaactgaattccaccaaacaaccggaatgagccctgcagtggattcttccccagagccctcaataaagaacagccttgattttagcctcgtgaaaccccaaactgaagacccagtcagatcacctgggcttttggcctacagaaaccgtgagataataagcttgtgctgttttaggtccccaaatttgtagtgatttgttacagcaagcatagaaaactaacacaatctccagaaagctttcttggatacccctggaacagctcctagttgtgattccaacaaatagggtggagaatagggccaggcacaggggggttcacgcctgtagtcccagtactttgggaggccaaggcaggtggatcacttgaggccaggagttcaagaccagtctggccaatatggtgaaaccctgtccctactaaaaatgcaaaaagtagtcaggtgtggtggtgcatgcctgtaatcccagttatttggcacgagaattgcttgaacccgggaggcagcggttgcagtgagccaagatcatgccactgaactccagcctggatgacagagtgatactctgtctcaaaagaaaaaaaaaattgtacagttctctaaaataagtcagaatacaggtagttagtaatcattatctacaattctcattatcttcatagtacttaccatacctgaagttctagaatttatttattcatttgtttgtctccaggtcctcaaaaacaagggcttggactgtctgttcacccctgaattcccagtcctcaatgaagtgcctagtacgcagtaggtctttgataatacttacaggatgatgaagaaactatttttggctctcatgttgaagacagagtcctcaaatgatatagtactatattttcaggagcttttttttttcatgaattatgccatggctttttttttcatctactcatgccttgttttatgtgttgctttatttttggtttgcccaaacagagtgaccgtagacaaggtggagctgcttttaaaggtgaaagtgccctgggccagtcccagaattagattttgcttgggtgcccatgggctattttcaaaagaaagggaagaagaggaatttttcacaaactgtggtcatcctaatatctgtctttcttgctccattacttaggctttgatacttgtgaatccttgaggatgctgttaaaactgtgtttttttgcggggggtgggggtgatgtcttctctcagctgtgttctgcttattatagcttaaatattttccaaagctttatggtctggtaaattgatttgttgaagaaagaggaaagttcttgcttaaaatacaattcaggagattggaacaaatcttcctggcaacattaaatagatgttgtaaaaaccctaatttgtgtctctgattccaacaaattcagtgttcatttgaaagcaccctgcagatgataacagctttcatgctgcacacgtgaaagacatattgacttggatgggacattcggggaaaatctcaggcattcatgcttatttcttgttttgaggcagtcaatagttattcacttatgtcttgcggtagaagcattacaattcagtcatttagtattttatagtaaaaaatagtgagaaataccattaaagtgggatgaactcactccttgtccaggagacctcacaatttgcagtgtgtgtggggctggggggtgatgtgaaagcctttctttaaaattcccagagaaggaaattcttgaatgcttctagctaactagggcaactcataaaagaaattttagtactagactagaaaagactcctcattctttgaccctatttagtaaaaaaatctaagtcatgcaaacaaaaaaatctcctccagatggtgttttgaagatgaccacagttcattaaatgagaagtccactacatacccagtccacttagatttaacttttctgtggtacatttgagtttattttgctttaaattcagtgattaaagaggttatgtaaaccgagctgcagactcttgttaaaagaacatgtttttaactaaaatgttatgtggatactgcccaatattcagatgttcaaaatagcttcttttaattcaaagatacagaattcttctgcagtaaaatagctggtttatgaaaattgtacaattgcccgatgcaggagttttccagccccaaatctttggatgtcataaaaaaaatttcttatactgggacagagcatgtgaatgggaaggtcgtttttgactaatttattcttattttctttttataaatatatcatatgttaattagagggaacttaggaaatatagaactgaacaaataagaaaaaaagccacccacaatctcactgtacagagataactactggtaatattttatacacattcttctagcatttcatgtatattcacatatacatactttttaatttagaaattttttactcagcataatattacatcttctgttttcttaacctaacaatatatttcaaataatatgcagtgtcctaatatattccgctagcctataattttttttttttgaaaacagggtctcaccatgttgcccaggctggagtacggtggcaggcttttggcttactgctgcctccacctccagggcttgagcgatcctcccatctgggcttcctgagtagctgggattacagggactacaaatgtgtgccaccatgccaggctgatttttgtattttttttttttgtagagacggggtttcaccatgatgcccaggctagtcttgaactcctggactcaagtaatctgcccaccttggcctctcaaagtactgggattacaggcgtgagccactgtgcccagcctagtctacaatatttttaacggttgcagagtatattgtaataatggttaatatgtattaaatacttactgtgtgccagttaccactgtcatttaatcttcaggacaattctataggacaggtgatactattaacttcactttgaaaatgaagatattgaggcacagagagaaagtcacttactcaaatttatatgacttgcaagtggcagagcagggattcaaatctcagattgtccctaggttgtctgcttctagtattctcacttaatcactaggccacaaagtacattgtggaatagtataccactatacaataacgtatataacatggcttctattttggagcattctcgttacttgtagaaatttgttctgtaactaataaagctatacacacacaaaatactgtttgtgcatatttctgattatttccctagatgatagatgtttatttcatgaaaagttatgatcatttctaagaaatgtgttttctgtcctgccatatttctgagagggccattttaaatacctaattttaacttatcctttccagaaaataattctggtgtttaaagcttcagctgtaacactccatgggtggtcagaccagaccaatgagaaataaaaatgcattgtgtcataatcatttttatttttgacaggtctattgataatttatttggtagatgtggttttgttttctctgcagaatccaaaaatacatgttacctagtaggtctacatatatgtatttgaaactcttccccaaaggataatttcccccacctttctgccatactttagaacagctttcctatccattgtctttaaacaggcctgatttcttccatgtaaaaaggttgtcatatgtttctcgtactccatggtacaaaaatatttttgaacaggacctggcagtgctgattcccctacctgagttagctggtaggtatgttaaagaggtaatctttaacatacttatggtactttatttttaattcttttcaagtgtgcgtgtgcctatacatgactgtcattttaggcttaactatagctatggacaagtctcttctgtagtggactgtgagctctttgaaggctgtcttgttcttattgtatccacagaaccaagcacagtgcttcctgatataggaaatagtccttgataaatatttgagtgaataaataaatgaatgaaaagcagagtgcaataccatgatggtttagaagtagatatcttttaaatctgggggttctagccaggtgtggtggctcacgcctgtaaccccagcactttgggaggccaaggaaggtggatcacgaggtcaagagattgagaccatcctggccaacatggtgaaaccccatctctactaaaatactaaaattagctgggcatagtggtgcgtgcctgtagtcccagctccttgggaggctgtggcaggagaattgcttgaacctgggaggcagaggttgcagtgaccgaagattgcaccactgcactccagcctggtgacagagcgagactccgtctcaaaaaaaaaaaaaaaaaaaaaaaaatctggggttccttgagggattcctagaggagatgacattggagctgttctttgaaaaatggactagtcttcaatgggcataaatatggggtaagatcattccagcaaaaggatgatatctcaggagggctcaggtcaaggtctttgaggggaaggaataagtagcctagaatctatatagggcaaagtgctatatcacaccactattaccaaggtaggctaggtcactgggggctttgaatgtggaatagaagtctggacttcatttagcaataaaaagtaaataagattctttttatttgtatgtttgcttgtttgtattttttggcggttttatttgggggagagggtaggatagaggggtgggtaggacggaggaggtaaaggttatactttatcaagaatgacctgtcagtgctttgttagatgaattatttattaagataatgctatctgtaacaaatccccaaattttaatggcttaacacaatagaagtttatttctcccccattcagcattccaaagcgtatgttcctggttggtggtgaatttttttcatgtggtaattgtggggccaaactccttccatcacctggttttggggtcccctaaagcctttgtatctcctggcgccttcagccaatggatgggaaagagactgggggcagccacatctacttcttggctgccttagcccagaaatgacacccttcactttcacttccacttccacgcccttgcgagagctagcaggtggatccaaaggaggctggagaacatagtctttgactaggcaggtgcaccccagctacaagtcctcactatggatgggggattgcaaatctttggtgaacagagtcatctcggtcacagatttaaagggagaacactagaattgaagacccctgagtagtctttactacaagctgaggtgagcagaaagtcagacctgagccaaggtacagacagaaaggatggccaggaggggatgggcaacaggctttgttcatggtgcaatttccgaagtacttacaaatcaagtatcaactgaaaaactgtttctttgttttttggggtttttttttttaagagggaacctcgctctgtcacccaggctggatcttggctcactgcaacctctgccttcggggttcaagctattctcgtgcctcagcttcccaagtagctgggacaataggcacatgctaccttgcccggttaatttttgcatttttagtagagacaagattttgccatgttagcctggctggtctcaaactcctgacctcaagtgatctgcccacctcggcctcccagtgtgctgggatcacaggcgtgagccaccatgcctggccctctgagaaacagtttcataacaacttgtgtgtgaatgcttgtgtttctgaactacttcaggtcctctcccagttcctccccaggcattattcagtgttctcagaacaatgatgcagtcactcccattattcattgttcccagaacaatgatgcagtcagtgagacaaggagctcactggctgagacgcttctcagtgaagctactaggatagctcacctgcatcatcgcagccccaacttcctttttgaaagacagatgataaaaataatgacccatattttaatattgatttaccaagagatgatttatacctttcttccccagaggtcttaaatgtctgcatgtttataaagcattattccatatcaccttctttgattctcaaagacactgtgatagtggtattatactcatctttctcactagtttgcatgaggattaactaataaagaggattgcaaagtgcctcattgaagaaatgcttaattacttgatgacttaactgctgggaaggcctattctcctactctctttgctttcattagaacaagctttgggcttttaattatcaggatattcattttaagaattagagaaggtgatagcaccttgtaaatttgactctgagatggcaagatacctctggatactcagttattatttttgtaattgctaaacaaaagaaaccaaataaaaacaaagggcaatggtccctcattagctcagcctaaaattctcatatccaagtgggaggttaagagtagtccctgatttttttttttttttaatgtagagactttctgtaggaaaaaaaaaatagacttgtgactgaaagagactgctcaaaatgaactacccatgatttaacaagaaccctggtagaaaagaacagaaaactggccagagagaaacttaagtgttttcctgaatgtatgaaacgtgtgtctcaacaactactatttgacattgtgaaggaagtgcttaggaaacagatcagtggtgactccaaagaggaaaaccaaaccctctgacagtccgccagctgggcactggccagcagtgtgcctttcccagcattgctggctctgtgtcctgagaggacacctgcctgtccccagggactcaggcaaaatggcctcacctaggtgcgaatacagctgtcagggcaaccaagtcctttttgaataacatggtggtgccaaggataggaaagctaacatgaatttaacacatggagtggggtcactttatcccttctatagacagtgcttctcccatattattatgttttgcatgaggaatgatgagtagagaaaggctttaatcttattgaagccttacttagcagttgctctaattcccttctgatctaaatagcagtcattctacatactgtttgactacaaagccctttcataaaatcttattcattttattcttaatgcctggggcagggcagatatctgttttactgaggtggataatgggtgaggggcccagggatggctaaataacatcccaagaattatccaatttagctatccatcctgtcccattcttacccacattttacaaacatgggaagcttacactgctagaaatggggcaaacagactggatttggatttgacattctttccactgcttagggtgccagggctaatgaaaaatgatcagccaaaaggcaggctgcaggggaggacaggatggcagggatccataccgctgaataagaagcccttggcttcactgtgcaccactagcagttctcaaataggaaattccctaccaataattctcaattactagcacaaccggaagaaagaagagcgcataggaaagccgataattcccacgttatttggctctagaaacgcagccaggaatgaaaagctcacatgcttgaccaccaagaatgactcactgcgaggcccactctttcaccaaaaaacagggtcagatagggctgggttcaaattctggctccaccattgacgagctccgcaagctggttggccaaatgacataacctctctgcgctgtggcttcctgatgcatacacagtggatagttctagggcttatctcgttgagtggttgtgtgatgtaaatgacagaaacgcatagcccacttaacccaatgcctggctattattatcgttattgatactgaatacatctttctcactctgtgacaccctgatgtcatcttctgccttaattactcactgtctaagagatttactcaataccaccttgcagtgctggctgtttttctaagtgaatatgactcatcgcctcaagtcaagtgtagtcttgggggactggagattcactctctttggcctttctagagtatccagcactgggtcatgtacacagtaggtgcttcataagacttttctggattaataccaccttggtatccagctctggtctcttttcactttctccttgttcctgagagcttgagaaccagtggaaattttaatggaaagaaaggcccagaggtgaaggaaaatggagacagggcctactggaaaaagcatgtgctgcaaaaagcaggaacttactagttgaattggcctagactagatctcttctactcaccagttatgtccttggcataaatggagaaaataacttctatctcataaggttcatattagggtaagtaatatgtattggcacaagggatggatttggcaaatgttaagtcctctccttccttcctctacattgatgacatcaatgaaattcaaaacatttacacattctgtcttctcacacagctgtcattactaggtttgaattattaccagcaaaattacctttgtgatgcctaagccgtgttcatacatataagccagattgaacatggcttgcgcgttgtggtatttgttggctgcaatgctgtagtgtgtggctgctgtttgatagtctttcttagtcccatagccatagtaatggtaatctccaatttttactctagcaaatgcattgcctgatagaaatattagagaaaaaagaatcataactcaaatgattcatgtatagttctcaggaattcaacctagtaatcttgtttcagtcctttaaaatatatatgtatctatagccaagtataaaaaggaaccaaaaacactcagaaccccagaactggaattagatatactttatggaatacaaatataacactcaatgctaactgttttcattatagcgtaacatccatggtatagtatgcatgttttgttgttgttgttgtttgtttgtttgtttgttttgagacagagtttcactcttgtcacccaggctggcaggctggagtgcaatggcacattctgcaacctctgcctctcaggttcaagcgattctcctgcctcaatctcccaagtagctgggattccaggcgcccgccaccatgcccggctaacttttttttgcatttttagtagagacagggtttcaccatgttggccaggctggtcttgaactcctgacctcaggtgatccacccgccttggcctcccaaagtgctgggattacaggcgtgagcctccgcgcccggccaaatgttcttaaagaacaaaaacttaccaattttaccttttaatttttttaagtagattaactcttgggaagttggaccccatccctcccattctcagacgtcactcctgaagctctgctctcctgcgtcaacagtgtcgccctctttcccagatcaatcctgtccgccattcaaacacgctctggcatcttctatgaacaaaaataaaccctctctttatcctgtggtgtctccttctagctcatgccccatttctctgttcccctttacactgaaccttttcaaaagtgtgttctatactcactgtctccaaagcttcacctcccatggactcttcaacccactccaaactggcttctgcccccttgcccgtgaagctgctattttgaaggtggtagatgacctccatgcagccaaatccattgccacatctctggcctcatcttacccgacgtctgagcagcactggagtgatgggccccatctgcccaagcactgtcctgtcgcagcattgatggcactgccttctcttggtttcccttctactgcatgggctctttatttcaaactcttgtctgactcctctgcccacttcctaaatgtggaatgtcaacggctcgctcccaactcctttttttctctttcttcttttccctcttttctcttctctcacctctcctccccgcctctctccaacaatctgctccatctcaactctttctctgggtgaccttgtttcgttccattgcctgtctttattaactatttctaaatttatatctactatctctctctccctgaggcccaggctcttataattgcctcttgatgtctccacttggatttcaaacttaaaatgcccaacagagatttcctagcaccctacacccgttcctccaaacaaaatcatcagtttcttccctgtctcagtacagcacccccattgttcaggccataagtctaggggaattattcctagttctttttccctcgcctccatcagccaattcatcaagtcctgttggttctgcctctaaaacacgcttaactcctgatatctcctccactgcctattccagcctacaatactacaataggcttcaaacccttcttttatcttcactttccaacccgttcttcacacaacagccaggatgatctttttttttatttttatttatttatttttgagacagggcctggatttgtcgcctaggctgtagtgcaatggcatgatctcagctcactgcaacctcagcctcccaagctcaagcgatcatcctaccccagtctcctgagtagctaggactacaggcatgcaccaacatgcccgtattcaccatattgctctggcttgtctcgaaatcctgggctcaagcgatcctcccaattcagcctcccaaagtgctgggattacaggtgtgacgcacccagccagcatgatatatatatatgtataatatatgtatatgttatatatagtatatatgtaacagttttattgagatacaattcacataccatccaatttacccatttaaagggtacagtcaaatggtttttcatatattcacagagatgtacaagcattaccacaattttagaatattttaatcgctctgaagagaaacctcatattgtttagctagaggatgatctttttaaaatgtaaaatcaagttatgttatttccttgtgtaaaatcctccaatgactttgctttgcccttggaataatagtcagactccttacgacctacaagttatgcctcacctgccctctgcacaagatccctgcattcgattcctcaaggccctctacctggcaggtttggaacactctgactcttcccgtggctggcttctcgtcattctcagaagcgccaatgccacttctctcctagaggccgtctccgactaccttgtctaaagtgctcctcagcccccaccccagaagttatctacctcatctccatgttttatttccttcacagcatgtcactgtcatctgatttgcttactagtttattttctctcttccatatgagggcaggtacttcatgaggacaagcaccttgaactcttaatcactgacacaatcccagaacccggaatggtacttgataaatacatatagaatgaatggatggacatgcaaggaaactttttagataatgctttccctagatatcaagtactttagaatatgactgtccaacaaacatgaatatgtcaagtagaaaaaactcatgtgactttttaagatctgagacttcagtctttgaagtccacttagggatgacccttaagggtccccttggggtctatgttcccatccacaaagagagtgttgattggaaagatgaaggaacactcatctaggacatccatctcagctgtggccagcccttctagcatggtctcggcttactcagaaaaagaggaagtgccctgtatgagctcaggtctagcattaagtgatataggactccttccaaaattttctcatttggccctaatgtagtgcataacatcctttggaatttattcctttaggtaccgaagttctaatcttctagaatcttctattaaaatgtagacacttcaaaaagatgtaataccatgagccttctttaagtctctctgagtacagctaacactataaaatttttattattattatttattattattattatttttgagacagaatctcactctgttgcccaggctggagtgcagtgatgtgatcacggctcactgcagcctcaatctcccgggctcaagagatcctcctgcctcagccccttgagtagctagaactacaggtgcacaccaccacacccaactaattttttttatcttttatttttttgtagagatgaggtctcactatgttgcccagcctggtcttgaactattggtctcaagcaattctcccacctcggtctcccaaagtgctaggattacaggcatgaaccactgcacctggtctataaaattcttagctggcaaagacattagttatcagggcttgctttccagatgcttccaaatgtacaggtcagtaactgggagcaagaacttataagaatggtgcccagaaaagaggcccaagggagtctgaagaagcaggaggtccaatggagctctaaagagaaacctattccatctctaattttgcccaaagctgccttcctttgaccctaagattcctcctgggctataaccacaaagagataggacaattctgtgcattgtcaagttgtacaggcagtaagcaggatccctgaagcctctaagaatggaaggcagtgaacaagctggttcttgggggaattcagctccaccctaataagggggctgactggcagcatgtggtgagccagacaggctcctgtggggatcaactgacagtggagggatttccacttcgatttcacagtcacagggcagtgactgagtcctgatggttcagcaccctctttacatgagtaactgctaaaaggagtatggccagtgactaattggaaaatttcattattagattccctagtcccaagtgagccactcagtagccatatcttcagggacacttatacctgacctctcttaggacacatgattatttttagcagcctgacttttttatattgaggaattcagtttaatatcaatgtactagctgggcgatggtataggctgatgcctgtaatccaagcactttgggaagccgaggcaggcagatcacgaggtcaagagatcaagactatcctggtccacatggtgaaatcccgtctctactaaaaatacaaaaattacctgggtgtggtggcgcatgcctgtagtcccagctacttggtaggctgaggcaggagaatcacttgaacccaggaggcggaggttgcagtgagcctagattgtgccactgcaccccagcctggagacagagcaagactccatctcaaaaaaaaaaaaaaagaaaaagataaagaaaaaaatatatatgtatatatctcaatgtacccttgttttcaatgtctcttttccttgctgcaatttccacaccatttcctggcttggaataaacccacatttgttgtaattgagctgactggccatggctgagagattgcgggtattgtttccccactctaaataaggtcttcattgcattttataaaacatagactttttaaggggaatgtctcactaaaattgcattgatggctgttgctgtgctaccggctcagctggatatgagaaagcaccactgtgactttttcctatgcttcatattagtgtcagctgagaatcattttttatcctattcacttcctgtgaaaagggatgatttggccttagcataagacaattttaagaaacctaattggaagcaaaattgctctcttattgcaagagagttttcacatatccaaatgccaatggtgacagctttgcagtatttctctgcttttaataatataattttaggggaaaaatagtaagagacatcgcaatgcaatgaaaataccacctgccaatgcttttcccaccactggtatcttatattccttatccatgtgatgccagcaagcgagacatggaaactcgaggaaaagcgagaggatcctgccatgtatctgttttgttttggtttggttttttattcttacatgctaatgattgtagtaaagatctgaagtttatggtagtcatcaatgtgatattttaatagagaaatcacatgagccttagatacatacataactaattttgcttgtaaactcattgagacatgggtcatgtctctgattagttcagtcaagatctcagcaatgaatgagtgaagccagaccaagaaaactggttttttgagtaaaattgtatatttcaaagaactgttctggtgtcacggagacagagccatagaaaaattcctatggcttgctgaatcagggaccttgataataatggggaaaataaattcctggaaatgatctctcaccaaagactgaccctaacatcagtatagtttgaaatgtcacctacttgatattctaccctttgctgcctatgtgcacaaacacgcagctacagcaaacgtgatgaataacagaggacagggaccgggtatgtgcttatttttatctgggttccataccttgaatggcagctcgattccataggagaagcgccattggatacatcttctctttttcaagaatgttagccttttctaaaaagaggagacattccattaggaaggcttaaaatgcctctgtagtaaagtcatacatgcatatgtatgattgggggattgcagagaattttaactcatcttactagattccaaaatgaatgctgaattgctttgagctacttcataccccatttctgcaagcagtgcatactgaacaagagaagaatctatatcaccatccttataggcaaagtaagctgtcaggaatttctcagcccagtggcctagttcacagacacctttataaagctgtacatgagaggagaaatcaaggagactagttagccagtatgcttcaccccaggcaaatgagaaaggaaatcagtcttcagctcctaccagctggtcagggaaggattttaggtctaaaacatggcttttgcaaattatttagggtaaagagttaataccttttataggcacaaagatcagaagtgtttgggtttgttttgttttgtttttgtcttgagggaaacttcctcagccttattttaaatttgtataataaactttcctgacttggaggctatttggaagaataagaatgtatcgctagtgtgtgtgtctgtgtgtgtgtgtgtgtgtgtgtgtgttcttaaagggactttctgagcactgctgctctgcgagggcaagttataaggccacagctgatgtgaaaaggagagaatgaaggaaagacagtgccggagggtgtaggtgacataactgtgagagaggtgtgcagagccctagggggacaaatgtcaacttagctgaatagcccttatgtaaccaaaagaggttagccatacataattcattaggaagttggcaaaggagcaaatctaaagatagatcattagctggcagcttttgaaataagcttcagaggggccagattgcaacatagagtatttatgctggtgtagcagacgtgtttaataaatcaatgaaggacattaaggtcctaaaagcattcttttggaaagcgcatcactggctcaggctgaaagaattcactttctcaattgtcatccaaatcatcaaaaacctaaggatgctgctttctgggaagaagtgggctacattttctaggctaaatctagccttttggttcccaagtagcaactcccaatcccactagaagtgccaaattgccctggtgatttgattgaatgctgaaacagagctccttaactgcatgttgaggtgagctctgaacctgatgaaaagccaaatgtcagagagaggagagatcttttctctgtctcccttccccaacctgagttacatcactgcttttcccctctgacaaatgtcagtattcacattgtcaactggaagaaaagaggtaatatttataaaatcaaagacaccaacaatttaagaacagtatcacctcctctgtgtcatatatgacaagtgctttaaaaacagccgcatattatatttacctccacagcagttctgcatgatcttactactcctgttcctgttgcatacatcttggccagataataaatggcaaggggctgcccactctgagatgccaggtaaaaatatttgaaggcaagtttataatccttccatattccagagccagctgaaaattaaaattgttttgagccaccccttattgactttattttttatattataatctatggatataatagtcatagtgatgcctgctatttaaatagaatgggaaaagccaaccaaaagtcaagctactctaaatccactatttgtgaaggtgggggtgaacactgagtttggttctaagtaagaatatggaaatttatattcttgagccattctgaaaaaaaaattgagaaagaaggactacttcgtcttatgaaagtatctcctcactatggcataactaaaattaatgcaaaggagaccaagtgatggtctctgaggacccgaagcgccaccatgatttatctcgccatctttgtgatccttccatatcaggacacccatatagcttctcccagccatgactatggcgtatgcagcaggtaaatcccagctccaagaagccgaactctcaccaaactcctgcttagagcaagaataggcacttgaagctagagcagagaaccagcagactcccagcagccaagattcttgtcctggctctctcattagttcttttgtgacttgggccatttaggcactttatttgcaaaagtgaaggctttccttagatggtctttaagttatcttccagctctaacactggagcctttagaagcagtgccatgtagcgattaagagcaaaagctctggaggcaaattgcttgaatttgaattccagctccacaactgtgtgatcctgggcaagatgtccaaccacaacattggcttagtttgctcatcacagtggatacactgtgggatacccggtagatgttgagagggtcaaatgagttgagagggtcaaatgagttaaaacatacgaaatgagttaaaacatacgaagacttaatatacattagccatgactatttttcttattctagaaacttgggaaatctggtagatcccaagccaaggacttggaatgaactagaagaacaaggccatcttaggcaacctcaaccccccaagatagtacaaaacaggtgctcctgctgggccaccgtggaaaatgccagtgaccccttgaccggatgtgacctccttgatgatgtggtctgctgctgccctggctcctcctctgacatgaaggacttggtggggatactcaggtatgttcatatctcctggtatttgtcttggccacttcctctctcactccccacagagattgttacaaactttcatggctttctaagacctcctagccaaccactctacctttgctcacagaagtcaactttgtacctactagatcattgaagaaaacttcatattgtctttcctcactcacctctctccccatcccattcccccatacttagattcgcatcatcctttccaccctctctccagtctttgagggtaagcaatcctgtctatctatcacggttaaagaggcttccactgatctgtgcctaatcaggtgctaataccaccaatgtttttcagaatctctttccatcaattataattatgctcaggtctcttcatcttaaaagtaactccctctgggtcctagtccccctgatgctgagttccttctctttccttccctttaagggcatgctgcttgcaagaatacttttatttctcaacttcctgatcttccgttcatgccgttggcatgcggcttccaccccaagcagtccaatgacctcacccacagtctctgtattgccaagtctcatacatatttcattctttcttactttttttttttttttttgagatggagtctcactctgttgcccatgttggaatgcagtggcgtgatctaggctcactgcaacctccacctcctgggttcaagcaatttgattctgcctcagcctcccgagtagctgggactacaggcagccgccaccatgccaggctaatttttgtatttttagtagacacggggtttcaccatattggccaggctggtctcgaattcgtgatccgcccgcctcggcctcccaaagtgctaggattacaggcgtgagccaccacgcccggcctcttacttgttttttaaaccaggtttctcactgcatttcacaggggtgcccattcatttactcttccttgaaagttcttcccttggctccattaagatctttttttttttttgttccctattccgctgagcttggctttccattcttctcagtgatgtacttcccctgcctacccttcaatacagcacggaggatcactagttatctaccatggcccactgctctttcctctcaccctcttgctcctttccttttgcaacctcaactactcttaactaatagctgcgtgctgatgcctctcgaaccttctctgtaagtttgacctttctcgtgagtgtcgtacttgcttctggggatgtgcacgggatatcgctagcacctccaacttaaccttgtcaaagataagcttcctgactctgcacctccttgtcccccctcccaaccagtgtccttttctttaggctttttcaaattcttatttaatttgttgcctaaatgttctgtctaaaccactcacaccaaacctttgatgtttgttataaaagaagcagacttaataatgcatatgtcattctaaataaagcagctgtatttgtggcacttacagtagtacatgaagcctaactggaactgtgcgtcgggccaccctttttccgcagctttctgaaagtatttaagtgcttcggcataattctgcaagataattacactctattactcaaaggcacaagtaaaactccatggaaacaattgccttccacttcttaaaaagagtatagacagtgccctatgtgatttagggtaattaaaatagtatcagaaacattatatattttatttcattattatattagactctattaggaaataatgcctcattttcatcataattatgtctttttctacattgacagtaagttttgttagatattgggggaaggtcactcaaaagactatgaagataaatttctccatcaataaagtcctcagaggatagatgatttctaaggttacttagaatctatgattctaagctataattagaattactattcttgtcacaagcttgttcttcagtgtctctttggcagagatttcactggattattttattctctattatctgatatcacagtttggcaaaccagataatagagataaattcctttaaactaatgaatgaccatgaattttaccctgtaaattgctacaaataaaaagataataaaataatttaacttaccaggggaactccttttccatgaaagtaaagaagaccaagcccatgaaggccgattgcattgccctagaagagttttataaagccaagtaaagtcccagaagaattcatgataaggaaaattactgcaaaatttttcaaaatatttgacatgcacccagtaagagattaatcaaggcagttggcaggttattctgacccactctagttcctccttttatactttcataaaccttctggctagaaaagggaagagggaaacagaagtcaaacctttcctccattcttgtattcaacacttatttaggacttgttttgtgtatgattccatagtaggcactgggcagaggtagcaggtgaaaggtaaaagatgaagaagccatgatccctgccttgaagagttcacacgctagggggctctgagccatatcaaaggggaggggcaggtcagacctcttagagtcctgtcaaatgtggtaagtcctaaagttgaaatagattgaggccgggcatggtggcccatgcctgtaatcccagcacttagggaggccaaggtgggcagatcacctgaggtcaggagttcgagaccatcctggccaacatggtgaaaccctgtctctactaaaaatgtaaaaattagctgggtgtggtggcacacacctgtaatcccagctacttgggaagctgaggcaggagaattgcttgaacccatggagtggaggttgcagtgagccgagattgcgccacttcactccagcctgggcgaaagatcaaaactccatctcaaaaaaaaaaaaaaaaaaaaaagaaatagattgagagtgttgcagacacctagaagagggacactctattgcctgatttagactaggaattgaaggagatcaagttgtcaggggtggtgacatttgagctaggtcttaaaggatgtgtaggagttttccagaagggagaagtctatccagacacttgttacctactcaggtctacagaggttgacgtaaatggcctaatcacattttagagactctgtggattacaatccagccactacagatagtaaagcatcgttggtatatttctttattcaaatttattgcttataacatccccgatgtttccttttccacttgatgctaaattaattactatttattttctgattaatattggaatactctaaggaagggagtatttagcacatttagtattcagcacatgttcaaatatattgatatttagcatatcaattttggatgaagagtgaaccttgaaagtgacttactcaaggagaaaactcctttttctttccatgtcctatcacgcatttcaccctctagtgactacagtaagaaaccatgattgaccacctgactttctttttttttttttgagacggagtctcactctgttgcccaggctggagtgcagtgaggtgatctcggctcactgcaacctctgcttccctggttcaaactattctcctgcctcagcctcctgagtaactgggattacaggtgcacgccaccatgcccagctgtttttcgtatttttaatagagatggggtttcatcatgttggccaggcaggtctcaaactcctagcctcaagtgatccacccatctcagcttcccaaagtggtgggattacaggcgtgagacaccgcaccctgccgaccaactgactttgattcagcagatctgtaggtatgttttacaggttcctagtatttctgcaggaacttatgttctaataaaaagctctccaaatttcttcttaccacctacatttagttattgtagatgcagccggagtaaccctcagtaacacaggaatagcacataaatagagaaggcatatttcaaaagtggtttcaagactccaaattttgagcctatcatatgaaatgatctgctattgtaagggttcttaaggacagtccatctgtatttaaaacaggtggtataactctgctctcttcttccctcttctctcctggctatatctcctgtggttctgggagtcttgagttgctctgctctggaagtagtaaggatcagtgtgatggatgtggcaaagtctagtgagtctgtcttcttctaattagccttgtttagatgtcatcttgaattgtagttcctataatccccatgcatcatgggagagacctggtgggaggtaattgaatcatgggggcggttacccccgtgctgctgttcctgtgatagtgagtgagttctcatgcgatctgatggctttataaggggcttttccctcttttgctcggcacttctccttgctgccgccatgtgaagaaggacgtggttgctttcccttctgccatgattgtacattttctgaggcctccccagcaatgctgaactgtgagccaattaaatctctttcctttataaattacccagtcttgggtatgtctttattagcaatgtgagaacggactaatacagaagggaaggaaacagatatgaaaggagggaaggaagaagggagagagaaaggagaaatgttagaatagcagggacaaattactttctcctctaagggagtccctgggatcccagggactcagtgaattacccatcactgtttaaggcccagtgtgcctatttagaacttgtcaggcgaagagtggccagttcagacacctgcaggaaccatgccggtgatataagaaataaaatatgccaggtagtggagacagtggtgcagatggagacacgtggagtccctgccctgtgtgaaggcagcagcagctctcagttcctctgctccagctggttggtgccacatggaatggcagtcctgtttcatcagcgtttgccattttcttttttctttttttttttttttgagacagactcttgctctatcacccatgctggagtgctgtggagtgatctcagctcactgcaacctttgcctcctgggtttaagtgagtttcatgcctcagcctcccaagtagctgggattacaggcatgcacccccatgcctggctaattttgtactttctgtagacacgggatttcaccatgttgaccaggctggtctcgaactcctgacctcaagtgatccaccagcctcagcctcccaaagtgctgggatttacaggtgtgagccaccatgcctagctagcttttgccattttcaagaaaagctagatgtttagatttggatgtgaattttactcatttatttttatttatttatttatttattttttgagacagagtcttgctctgttgccaggctggagtgcagtggcatgatctcagttcactacaacctcttcctcccgggtttaagtgattctcctgcctcagcctcctgagtagctgggactataggcatgtgccaccatgcccagctaatttttgtatttttagtagagatggggtttcaccatgttggccaggatggtctcgatctcttgacctggtgatccgcctgcctcagcctcccaaagtgttgggattacaggcgtgatccaccatgcctggccagtttactgatttttaaaacactttctgggccagaaaagccatatgtatagccaaaccctgcagtatacacctgctgtttcagggtgtaatgctcttgcttaggttagctgacatgaagccagggagcagacaggcatttctttggcaaatatttaataatcccctgccctggacccctttatttaataaccccctggcaggacctttgccctcctctagttgaggacacatggcctttggacaggaggggagaagccacaggtaggaagcagttaaatcccagcagcaggagtgaacgcagggtaagttcagaacaggaaagagatcatgtgagccagcaagggcaggggcagctctgtggatgaagggaggattgggctccgctctggggatgagtaggacttagaataagagagtctgggaaggggaggcagatgacaaaagtatggagatggggacgggcctgacatgctcagggcgcaagagagaactggaggaatgtggtccaacatgggcacaacgtcacatacagtcactgtgcttgtttctaagtaaataagacaaaagatgttgtaaaatgtgtagctctgtgtcatggtattgatatcatttaaaaacaaatttagaaagcagtttttaaaaaagtagtaagagtgagaaatctaataaattgttcaggcgctgatcaagaagtatgtggccatctccacctaatgccatttagaataattaccttaattgtaagttcagatttcctttgtaaaggaaagtagctcgggttcagcgcaccggagacccagatcactgctggttggttccacaaccctgaatagcttggaatctgagttaatttacattcccatctccctggcattattcttatgggctgacaaatcagtgttatttgccagatgataagagattttccatgttactccttttcagtctgctcttccttgtcatcctaatctaatggtacttcagataactgcctttctgagcaacaattccatataaattacaaaggagaggagcagagtactagccttctcagtaatttacaccacaatagcagcagctctgaggtggtagtcacttataaataggctcctaaagcagtgtgtgggtttttaaaaactgagaacagttgaaatgattcctggtttgagcacatctttactgccagtgttccagtatgcaactgtaagacaacaaaatgcttcctactgtgcagggttagaaagtttaccaaggccattcgccaagagcaggccgatgggtgtgggatgagggcattttttatgcatgaaagggattcaaaggagtctactaagtcttatctgacagataccagcctcacggaccccaggagcagaggcaaagacttcgatgcaggaggcatattataccatttcgatcgtccctcatacagctaattcattctgtctgggatgtgcttcgaagttcactccactttactggccccagactgcaaaagataaaagcgcccttactgtgtgccaggcactgctttaagtacttcacaatatgaatgaagcatagccttgtgagcagctgggactacaggtatgtgccagcatgccaggctaatttttgtattttttgtagaaatggggtttcaccatgttgcccaggctggtctcaaactcctgagctcaagcaatctgcctgtttcagcctcccaaagtgttgggattacaagcgtgagccactgtgcctggcaggcaaatattcttaaattcccattttacagatggggaaattgaggcacagagaggctaagtaacttgcccttgttcacacagctagtcagttttagggctgccattcaagccagggattctgtctccagatccctattctcagtcgccttgccctggcctcctccctgacaagctcccgcctgggccagagggagctctggcctttggatgagatgagactggagaaaactggacattcctaggatgtctttgtcttgaacttcctgcagctattgattggattttcccttcctctgtcctcatctcttttgtttcctgttcctaagctagatggcctcatctactgcataagggagaggggaaagctgaacttctgtctggctgaacttctgtctggcctcctcctggcctctgctagggcagcacaagccactgccatttttcattttccaagaaggcaagttgtagcttcccttactcccatcaccagtattatacttctccaggacacaaaactccttacaggcccattatctgggcttgggacttcgaagtcaattctttggcaccagtctgcgtgtaataaaagcaatttgtgtgtatgtgtttacaacagtgcattgaggacataccttactggctgccatggaaaagtacttgaaggcagtagcgttattttgcggcacggcagcattcccctctaaatacatctaggaagaaaaatgaaaagaggatagaaaaaacaaaataatttgagagtaatgcaaatattttaaaatgaaatagaggtaacagtggtacaacatattgaatgtagtaaatgccactgtaaatgccactgaattgtataaagtggtcaattttgtgttatttacatatttacattttacctcaatttaaaacaagaaaaagtaagagtaccatttattacagacttctggagtgaccctgcctgagggcaaagaaatggaccctgtttgtgttttctctctctctctctcttttttttttttttttttttgcatctacatttactgtatgttgcacttaggaagcaggacattcgtccctatggttactaatgcaaatcggctgcagggagccaagggtggcacacaggggagtgaatagtctttgaaggagacagaagaacatgcctttccagaggaaccctccaccaggctactctgcagccacaggaggcctctcatcagaggtggcataaggatagctctggtcagcctggagctgattcacactccagcagtagagcagagaagggcctgattgggctgagacctgtcccggtctccagtgctcaaccaacctggatctcctcttacatattggggagtggggtggtcataggctcatagctacgctcagaggaggagccctgggccaggtgcacatttttattttattttttatttttggagacggagtctccctctgttgcccaggctggagagcagtggcgtgatctcagctcactgcaccctctgcctcccaggttcaagtgattctcctgcctcagcctcccaagtagctgggattacaggcacccgccaccacacctagctaatttttgtagttttagtagagacgggggtttcaccatgttggccaggctggtcttgaactcctgacctcaaacaatccacctgcctcagcctcccaaagtgctgggattacaggcgtgagccaccgtgcccggccaaggtgcacttttaaggctgcttttggtgccccagataaaggctgctgttatatggggcttcttcccaaactgtcacctcaagaatatcaccctcgggttgcagccagatgtcccacttagccgcttccgtgaaagaggcctgctgccctgtccctctacaatgggttcaatgagctggtatcattaatttgttagatttttaatttttaaatttaaattttaattattttgagatgagggtcttgccgtgttgcccaggctggttgcctgtgctcaatgatctttccacctcaacttcccaagtagctgggacaacaggcacacgctgctatgcccagtttaatttcttaggtttttaataaatgaaaacaatgaatcaagatgaagcatgtacctttcctataaatgccatggcatttgcactcccggcctttgctgcctttaagaagtagtgtaatgctttctggagagaaaaggaacagtgttattgctagtcacaaaataaatccttcaaaatagctttttgaaccaaactttattcaatatgcattcaaaaaatatctatggtgcttgccactgagcttaaaaaaaatctgtgaaatgcccattttgttcaaggcactattccaaccaaatgcattttcaaccataacctgaggagtgggagagtgtctatatctctttcttacatataattttataacatgaggacttgcttcttacatttggaaagccacgatgggaatgtcgctttgtagggtgagatgaatcccagctgtgaagctaaatagtccattattttgaaaagcaggcttctctgttgacactgtgtacttaatgaggttttactgtggttggcagaattggatacacagtttgctaatgtttgtaggcagagtaagaccagacacacttggccggctgctgagatcaggtctttatgcagaagtgagctttgagacaattccttctgactcaaattgaaggaggccagtaaagcctctgattttgtctaggtcgttacattaaatgaagcactctgtctagaacacataagggctgaccttgtcccttgctgccacactccctaggcctcatctcgaccttccggaaagcccctccttggaaaccatgtagagcaataaaagaaatcagcctcaagaatgtggtatgaaaccgctctttttttttttttcgagacggagtctcactctgtcgcccaggctggagtgcagtggcacgatctcggctcactgcaacctccatcttctgggttcaagtgattctcctgcctcagccttctgagtagctgggattacaggcgcccccacccacaatgcctggctatgaagccactttttaaagtgtcttgttaggatacgacctttctgctctttaaaaagtcttgatcaggttgatgtgcaaagacgttccttctcaaagagaagagaatgtttaaggaagaactgctggtagttattttacatggaagtttgctgtaggaatgttgctaacttctttgtgggcataagtacaaatgctgccacagttaaacctcatggcgtcatgcatccattcatccatccagctcttccaatcttcatttaccctttcaaaaacttgactgaagcctgctatatataggatagtatgttacgtattatagatgattcatagataaacagaaacatgattcctacatttgctccctagcaatgttcctgagaaagaaaatatatataaacagcagtgagatagtaggtaataggtggtataaaagaaactccataaggaattagaagggaatagaataaaagacattgtatccagttctcctataagtttttgcaaactttttcttacctaatcttcacaatagcaccatcagagggtattattaatatctgatcttattaccaacatgtcagagtcatgctgttagtactgcagatcaataagcagctcaccactctgtctccacagtatacagaggagggctaaaatgatcgaggcctcatgaaagatggtgacaagtcaccagtacagaggctaggggaagaacctgagcaaacgaatggggatgggagtggccaagatgtgttcagaaaatagtgattacttcggcgtggctgaaatagaacatccaaaagctaagacttgcaaaaataagatggcgccattactataaacaatcttgaagactaagctaaggattttatttttttaattaaaaaaaatttttttgagacagagtcttgctctgtcacccaggctggagtgaagtggtatgatcttggttcactgcaacctccacctcctgggttcaagcgattctcctgcctcggcttcctgagtaggtgggactacaggtgcgtgaccaccacaactggctcatttttgtatttttagtagagatggggttttgccatgtttgccaggctgatcttgaactcctgacctcaggtgatcctcccatttcgacctcccatagtgctgggattacaggtgtgagccatcacacctagacgtaaggattttactttattttattttaaaaaatagaaaatagaagccactgaagatctataaatgttagggaatcctgaagataaaatgcctggaatcatccaagtgtcagctggagaggagaaagttatagcaatgtacaagttactaaatgagagaacactaatatcaaaaataaaagtgtatctcatgaatctctctactgagccatgaccaaaatatgtccccaggtaactgtgtaaattacacaaatcacattatctcctgggcttggtttccttattcagattctcctcctctgtgatctcacggcacctcatcctgtccgtattgtggcattcatccattgatttcattattgacttattttgtctcctccaatgttgaatcctctgtacttagcatagtgtgggctatatgttaggcaccaggaaatgtttcagaaatgaataaatgtatgaatgtctatccatctctaaaacaaggcagctggactttaatctttataggctcttctagctctagtattatgattctgtaaaatcattttcaaagtccagtttagtaatttggctctcaaatatcttgtaatagagacttctgaaaaaagtttcattctgggaaatcagtgaaattttaaaagaaagtaacttgttctcctgaagcaaatataaatcctggagttttccccacccttaaatataatgatttgataaagacctaaaggaattgagactctgtctcatacactgctccactgtcatggcttacttagtatttcattccctttttttttctcatttttaaatttacatgtccttaatactattgcttcaactatataaacctttattaaacaccacgtgaaactaccaccaagcaagctaccttgatggatatacacgagccaacctgagttcttgctcttgaagagttaagatcaagtactcatccatccatccatccatccatccatccatccatccattcatccatccttccttcaaatattaactgagcacccaacatcatatttcactgattctaagatgtacatctcctcccacctcacttccatcaggacatattataatatatattggtaagttttctttttttcttcctcagaacataaaatacttgtgtgtcttacaattggtggtgtcttagtatgaaatatagtacgccccaggtattacactaagtaagtaaagttttattatttggacccatatctctctttttaaaaaatgatcatgatttttcattggctctaagaaaatctgtagtttaaccagtttgtaacatttcccctagaatgaaatgccaagaaaatgtactgttctaaaaacatttatgaatatatatgtattttctttttgagatggagtctcactctgtcgccaggctggagggcagttgcgcaatctcagctcactgttacctctgcctcccagattcaagcgattctcctgcctcagcctcctgagtggctgggactacaggcgtgcaccaccatgcccagctaatttttgtatttttagtagagacggggtttcaccatgttggccaagatggtctcaatctcttgacctcatgatctgcccgcctcagcttcccaaagtactgggattgcaggcgtgagccaccgtgcctggcctgaatacttcttttatctcttgctctgtagaacatcctgagaaaagatggtattagctctttttctaaatttttaaatgggtggtaggatagacaaagcagttgcccttacaaatttgatattattcctctgctaggtttaatttaattacgctttatccattttaataatattcacccaaacatcccgctttcctaatccaatttattctgagccttcatatatttagaaatgcaaataaaattaaaatctatgtgtagaaaatccaagataatgtaatcaagaattgcatatacaatatttttcactaattaagaatttggtcagggagagggtaaaaacgttttctgtgatgacaactcatgagagagattagttcaaccaaacagtgaggaaggaaaagaaaggcaagctagtcatttccaggtatcttgaaatttaattttctgagcagtggactggagcatcatatttaaagagagacttatactaataattctctttggtggactgaaatattagcatgctggctcaagtggtggtcttcaggctgaggactatagttaaaaataagatattgtatatttcaaaataactagaagagaggattttgaatgttctcaccccaaagaaatgacaagtatttgtggtgatggatttgcaaattaccctggtttgatcattacataatgtatacactacatttgcatacatatgtatatattacataatgaatatattatgtaatgatcaaaacatcacattgtatcccataaatatgtacaattattatgagtcaattaaaaaagaaaataaaaagaaaagaaaacattatcctgtctgaggaggagagacttggaaagatgagaagcgaggtatgaaaagagctgcagtaatagccttttggaaactggatttatctttgtatcttccctctcccttatgtatctcccctgccattccaagttgattctggagcagctacactatggtatgttgcaagaatgaccacagtactttgcagctctgcccattgagaggagaagcccatttccctacccctccaagtttgctggccttgtgatttgctttggccaaaagaatgtggcagaagtgacttgtcagttctgagctcaggcctcaagagacttctgctctggtgttcttagaactttgactgccatgtggaaagcttgggccagttggctaaagcatgagaccacatggagaggggccccagtcattctcgcagtcacagatgaagccatcataaaccagccagctctagctaatgttccagctaactgcagatgcatgagcaagcccagctaagattagctgagcctggcccagatcagaattgctcagctgaggctaaccaaaattgctgacctgccaaaatcatgaattaaataaatggttattattgaaaaccacctaagtttgggactatttttttaaaaatgcagacaaagataactgatagataagtcaatttgtcttttttttttttttttttttttgagacggagtctcgctctgtcgcccaggctggagtgcagtggcgggatctcggctcactgcaagctccgcctcccgggttcacgccattctcctgcctcagcctcccaagtagctgggactacaggcgcccgccactacgcccggctaattttttttgtgtgtttttagtagagacggggtttcaccgttttagccaggatggtctcgatctcctgacctcgtgatccgcccgcctcggcctcccaaagtgctgggattacaggcgtgagccaccgcgcctggcctcaatttgtcttaaagtttgagatttcaactggagttctccattcaagttcagggtcattaggctgaggggagaagaaaggaccagcctgtgcttacccgcaaagagtacctgcatcacaaggatggttctggaattaaactcgtcttcttgggatatgtggaagcaggaggcccaacccactatcaggaagagctaaaggaaactgagagatcatgtcatttcttcttcttgctttataaatgagggaacagattttagaggctgttttttgttttggcctgggtcaaataaagtttaatgtaaaaagctcaggttttgatttctgaaggcctgagttcaaattctgcttcttaaacaatcttacttcccagctgtgagccttgaagcaatttactttatgtctccagcctctgcttctcatttgtaaaacagatgtaataaaacctcgtgaatgagcccacaggagatcctggctgggctcctgggtgacactcagctgcctggctgctacacaacagctctgggatcctgcaacagcagccctgggattgcacttcatcctcacctggaggcagctgcagctgccatctggtgaccacagtggctggagctgactgaagtaccaacttagtgggattttattgcactgtacaaagattggtttgtcttccctacagctgaagctaggatgccctcacatccaaatttcatgtttatggaaaatgaggacgtcttcctagttacatattctatgattaacatgagaaactcattgcaggctgaaatctgacagagtaaaattatgaatccagatatttccatctaagaagctagaactttggttatgattaagatgaaagaaaatctatggatcttcaaccgagctgtcttggggtgcgtatgcttatttaaattcctacctattttatcacagtttatgaaatgacttcgacatttacctgatgtttactggatctcatataaaatacaaattatagtaccaaagacacatccataaaataacacaaaatgaaatgcaaagtagtaacagattacttttttacgtaatagccttataaagttgtttctatcacttagccattgggactatgttgaaataggctacatgttcctttgagacaaggagcatgtggctcctataaatgaaaagagcagcaaaatcatctttaaaaaaaaaaatccagttacttcccaggtctgtggtgatgtagggccttgaaaccactatcaaaatctaagcaagaactcatcccatgaccctggcatcttacagaggaggatcctgtgtatgtcaaggtgaagttcatttgttcatttgcttttttcttcgctacacatttgaatggttaattaacttatttattttttttatttttttatttttagagggagtctggctctgtcacccagactgtagtgcagtggcatgatctgggctcactgcaacctgtgcctcccaggtgcaagtgattctcctgcctcagcttcccgagtagctgagattacaggcacgtgccaccacgcccggctaattttttgtaattttagtagagacggggtttcaccgtgttcgccaggatggactcaatatcctgatctcgtgatccgcctgcctcagcctcccaaagtgctgagattacaggcatgagccaccgtacctggccggttaattaaccttttaacctcactgggataaggtaaggttaagcaaaatgattgaaaagagctttgcaaatgtataaggatgtttaatatatttttaattatattaaaagcaatctgtcttctgatatagccaaatggggatgaagttgcctctcagactccttaacggtgatccccaggtggactctgcagctggccttgtgtgcaggccggcaggtggggatattctctctcctaatcccagcccaaagtgcgtgtgagtgcgcagaactaggttctgttggaacatggatacccccctgcctcgattgctcctcagaagtcccttcccctttgttcttgaaggcaggtgggtaagtgctccctctggagaacttagttcttcctaagaagctgggaagcatagctgaccaaggaagcatcagtgggctttctgagcaactcttccacctctccctccccctgctttcacttccctgccagcctccctcaccactaccttccccaccccatttgactggatcttgagattgacttacgtagtaatcctgatctagacctttcctgccaattagatgtaattgtccaagagagacctaggaatgatgagtttggaaatgattttagcagcagtattactttaaataaagaaaacatttatgtggtgattttactttagtatgttgattgttggacacgtttgaaatgtcctgaaaaaatcagggaaacattccagactatatcatttattgggtaattggttgctgctggacatatggcttccttagtggctggaagctggtcttctggggtacagaaacacccaggcacataaagctaggggccttagctcttggctctcaaagatcatgcaaatactgtcccattcccaaaaacagaacctttctggattgccgtagtttattcatactaaaaccaacattggggttgggcgcagtggctcacgcctgtaatcccagcactttgggaggccgagatgggcagatcacgaggtcaggagatcgagaccatcctggctaacatggtgaaaccctgtctctactaaaaatacaaaaaattagccaggcgtggtggtgtgggcacctgtagtcccagctacttgggaggctgaggcaggagaatggtgtgaactcgggaggcggagcttgcagtgagccgagattgtgccactgcactccagcccgggcgacagagtgagactccaactcaaaaaaaaaaaaaattaatttttaaggaagaaatgcaaaaaagttgctattattatggcaactagttctccagtgggctacaggaactgtaagtagcagggaacaaaacaggagtagggtgagagaggagggcgggtctccccccattcctatttaggatggggcattgttcatccctccaggactcagaaagaattaagccccttgtaattttcatgttctaaaaactcaatctcatctgtatacattacttgtatctgaacatctcctctttctgccaaaaatttatagtattggtatatgtcccaatccaaaatctcactgttagaactcagattttcaggtctttccgttagtctcactttttccactggaacaccttcacttttttcaaatgtgtcagcaactgtgaataaaaacaagccagagaatagctagaaaacagaggctgcaagagataacagtcaatttagagaaaacaccgttagcttattatcttaaattgtgcagaaatctgttcaactaatagagacagaagatccatgaaaaatagaaattttcagatttttggccaggtgcggttgctcatgtctgtaatcccagcactttgggaggcagaggcgggcaaatcacttgaggttaggagtttgagacctgcctggccaacatggtgaaaccccgtctctactaaaaatacaaaaattagccaggtatggtggtgcacacctgtaatcccagatacctgggaagctgaggcatgagaatcacttgaacccaggaggcagaggctgcagtgagccgagattgagccactgtgctccaacatggatgacagagggatactctgtctcaaaaaaaaaaaaaagtgcaatttttgtttattgggttctctagttcttctttgcaacctatacaagtatggtatcaacttatatcagactctactgaagatcttgaccaaaaagactcaaggaaaggggatattttaggagcagataactcattccattcataatttttttctgggactaagactataatataggaataatcactgctctttaattacttcctatggatagtctgaaaataaatataaagatagatatgcttgaatacacctaacaaagtgtgcagtttgaaatatatatagtaattccaatttcattaaacacatgaaatgatctcattatatacagcatcttaaattcaaaactagtttttttcctccttctttcttttctcagatcctaataatgccaaagatgtgtgcttagacattattctgattacatttagactaatggttgcttgaattgttctcatatgtggtgacagatacctccaatgtataccttacattcattcctttaggaatttttggcagtcatcccatattctgaatgttatatttagggaaactgcttaatatttatcggtgctacattcaaattctcagtaaggaaagaacatcacaaaggcaagtaaaacagaattgtttggggatacatattaacaaaaataaaaaatgagtataatcttttaaaaccatttggaaagtaactattaaggaaacagaaactgtattatgttaaaagaattgtattataacatattaaaaacgtacacttttgatattttcataagtttatatcaattgaactgttattgatttatttttctaattccttggcaactgtttattttaaaataaattatgtggattacttactataatctgccactttcttgtaataacttagggcaacttcacaattctgtagaacattgattcccgacaaatatctgtacccctaaaacacagacagatgcattcttaatattcaagacaatgctgtatttatggcatacaaatttggttccaagaatattttgtttacaaaccaaaatcatctgggacatcatgtttcctccagcacttccaaaggtgtaatatatcagtgcctaaagtaaaaacaaacaaacaaaaaaccccccaaaccaggttggccatttaaatttgaaactcaaaccaagtattccatttttattcctagctccataatgacccattgagttactccaaaataaatttcaaatttcactctcctttgtaaagatgtttgccatttattaggggttaactaatctctggagtctgtgataagggcattgtataagatatttcatttaatcatcataatttccttatgaagcagatattatctatcttcaatgaagaggctgactcatgaggctttaagaaacttatggcataagaacactaaatttctttgactattaagttggtgttttcaactactacactagagtgagcccctttacttaatgagtagattttattcaatgtcccttttagagaaatcaattttgttccagaataaaacagaatgatctttaccttagcttgatcatattccattcctattccataagaagacaaaaatcctaatgcctaaagcacaaaagaagaaacaaaatttaataaatcaatttatttcctaattatctatatggataagggatatcttaaatgtctgcttcataataatttgcattgttaatttctttctttctctttttttttttttttttttttgagacagagtctcactctgtcgcccaggctgaagtgcagtggcgagatctcggctcactgcaatctctgcctccagggttcaagtgattctcctgcctcagtctctcgagtagctgggactacaggctccagccaccacgccccgctatttttttttttttttgtatttttagtagagatggggcttcaccctgttggccaggatggtcttgatctcctgacctcgtgatctacccgcctcggcctcccaaagtgttgggattacaggcgtgagccactgctcccggcctctttcttttcttttcttttttttttttttgagacgaaatttcagtcttgttgcccaggctggagtgcaatggtgcagtctcagcccactgcaacctctacctcctgggttcaagtgatttttcctgcctcagctgcccaagtagctggaattacaggtgcccaccaccacactggctaatttttgtatttttagtagagatggggtttcaccatgttggccaggctggtctcagctgaccagatggggtttcatctaaggccaggctgacctcaagtgacccacctgcctcggcctcccaaagtgctgggattacaggcgtgagccaccacgcctggccattgttaatttattttttatactataacagcacccttttacatttttattaaggctgcaggaatttgggaaagctcacaatagtgggaggtttgtgtaatatacatgaatataggctaattcttactgtgctttagtataaattatagcaataaaaccaagggcccttatatactttcctttcttggaaacgaaatatttttccttcaatatttaaaacatttaggctgggtgcggtggctcacacctgtaatcccagcactttgggaggctgaggtgggtggatcacgaggtcaggagatcgagaccatcctggctaacacagtgaaaccctgtctctactaaaaatacaaaaaattagctgggcgtggtagcgggggcctgtagtcccagctgctcgggaggctgaggcaggagaatggtgtgaacccgggaggcggagcttgcagtgcaccaagatcgcgccactgcactccagcctgggtgacagagtgagactccgtctcaaaaaaaacaaaaaacaaaaaaagcccatttagatttggatacttttcttcacattaattttaacgtgatggatgtaaaatattcaaacaataacaaatatacagaataaaaaaatcaaaggctgagcacagagcaagatgatggaataggaagcctcagactgcattccctcacagggacaatgatttaattataaatgatcaaaaaagcctttttgagaactccagaaaccagttaagaagtcataggacagcaggcaagctcaaagccaagaatagtccgtgaaacaggtaagaaaagccatttaatttcacccatgatccctcctccctcaagccagcacagcttggtgctttcaggagaaaaagcccaactgacagtttctaccttgggagggaaagagaagaaaggaacacatgacttttcagggggctgttccagtgactggtttttttcctcacctaactcacagtgctgacagagccagtatattttccatccctaggggctactgagaacaaaagagctcaatggcttactgcagtgccagagaacttgcagtaccacagacagaaggagaaagagattataaactcctggaagaaaaaaaaaaactggcaaaccactctaattgggaaataacttacacaagcccagagaagatgcatccccagaaaaggttcaagaagctctcagaatttttaactgtgctgattggtgaagacctttcacatacgaagctagtctataaagactaggagagatagctgtttttttaagtgcacaaatcgtagcaaaataataacaacaacaacaacaacaaggcacaccaggaaacaggaaaagatggtcctatgaaaggaacaaaatatcctgaaatcaaccttaaagaaacaccaaataatgacttacctaacaaataatttagaataatcatcttgaagaagctcaatgaaccataagagaataaagaaaacaaaatctggaaaatgatgcatgaacacaatgagaatatcaacaaagagaaactattaaaaaaacagaaattctgaagctgaagaatactatatctgaattttagaaatgcactaaaggaattcaataatagagttgatgaaactgaagaatcagcaaacatgaacataggtcatttgaaattattgagttagaggaacaaaaagaaaaaggaatgaagaaaagtaaagaaagcctaagggacttatgggataccatcaagtggaacaatatatacattatgagagtctcagaagaagaagagagagaaagggacagagaggatatttgaagattaaatgattgaaaactcacaaatctgaggaaggaaataggcatctaaattcaagaatatcaaaggattccaagtgagatgaacccgaagagccccaaaccaagacacattacaatcaagttttcaaaagtcaatggtaaagaatgttaaaaacagcaagagaaaagccactggtcacataaaaggaagtccctgtaacattatcagcagatttctcagcagaaacattacagaccagaaaaggatgggataatatattcaaaatgctgaaagaaaaagctgtccaggccaggcgcagtggtgcacacctgtaatcccagtactttgggaggccaaggtgggcggaccacaagatcaagagattgagaccctcctggccaacatggtgaaaccctgtctctactaaaaatacaaaaattagctgggcatggtggtgcatgcctgtagtcccagctacttgggaggctgaggcaggagaatcacttgaacccaggaggtggaggttgcagtgagccaagatcatgccactgcactctagcctggtgacagagcaagactccatcaaaaaaaaaaaaaaaaaaaaaaggaaaagacaaagctgtccaccaaaaacactatatttggtgaaagtgtccttcaaaaatgaaagaagaataaagcccttcccagacaaacaaacgctgagggagtttatcatcactagacctgctttgaaggaattgctaaaggaagtcctataagttgaaaagaaaggactctagaactctagaaagcaacacaaaagcatatgaaattataaagctctatgaaaaggtatgtatgtagacaaatacagaattctgtagtattgtaatggtggtgcataaatcaattctggtatacaatttaaaagacaaaacagaaataattataacaataaaactacatttaaagtatataaagtagtaaaaagatgtaatttgtgaagttgataacatacagtggtggggatatataaatgacttgagattttgtgtgtgattgacattgtcattatcagtttaatatagattgttataagatattttagccatccattgtgcctcatgcctgtaatcccagcactttgggaggccgaggtgaatggatcacctgaggtcaggagcttaaaatcagcctggccaacatggtgaaatgccatctgtacaaaaatatgaaaatcagccaccatatgatggcaggcacctgtaatcccagctacttgggaagctgaggcaggagaattgcttgaacctgagaggtggaagttgcagtgagctgagatcacaccgttgcactccagcctgggctacagaatgagactccatctcaaaaaaaaaaaaagtataagatattttataaattattcatggtaatcacaaagaaaatgtgcattgaggatgcacaaagaaaatgaaaaaggaatcaaagcacaccaccaaaacaaaaacaaacacacacaactaaaaacaaaggaatgcagtaagagaggaaaagaaggacaaaataactacaagatgtacagaaaaaaataacaaaacagcaatagtgattccttccctatcagtgattgctttagacgtaaatggattaaacttccaaataaaaagatatagagtgactgaatgaataagaaaacaagtttcaggtatacactgtctataggagattcacattagtataaggacacacataggctgaacattaaaggatagacaaagatattccatgtgtcaaattatgcccctgcttaacagacaagatggactccctgtggctgaaaagatgaaagcagaaccaagagttatatggcagggtgaagaaatggtcacactttctgtgtccttggaaagcattataaaacctgtttttccacaaccaagtcaaagaacaatttctgaaaataactgcagctagaaattcttcaattgaccccaacagaccacctggtgcctcccaactgaacacctggaaccagctaattaagacagactggtgaaatggtcatttaatcaagactctgttccccactcccctgattcccctcccctgccctgtgtttttggcctttataatctccaactttccaactcccacctcaggtcacacttcgattttgcactgaaggctgcatctctccaatctgcagattgcttttagaaaataaagttcccccttttcctccacagaactcattgatcttttgttaacacaggcaaatggtaaccaaaaaagagccagagcagccctacttatatcagagaaaactgactttaagccaaaaattgtcctaagagacaaagaagaacattatataatgataaaaggttcgcttcattagaaagatgtaacaagtataaatatatatgcatctaagagcaaagcatccaaccatatgaagaaaatattgacagaactgaaggaagaaatagaaagtaacgcaacagtaggagatttcaataccccacattcaatattaaatagaacaatcagatagaagatcaataacaaaagaccttattgtatttacacaataagatccattacagaccagttggaccaaacagacatatgtggaacattctactttacaggagcaaaagtatacattattctcaagggcgcacaaaaacagtctccaagatagatcatattttgggacagaaaacaagtctcaacaaatttaagaatatttaaatcataccaaatatcttttccaaacccaatggaatgaaactagaaatcaacagcaaaggaaaacaaaaaacttcacaaatatgtgaaaacaaaatgacatattcttgagcaacaaatgagtcaaagaagaaatcacaagggaaattagaaaacatcttgagaaaaatgaaaacaaacaacaaaacacaccaaaacttatggggatgcagtaaagcatcccataagatgctaagagggaagtttagagcagtatataatataaaatgcattactaaagaagatctcaaataaacaacctaactttatacctcaaagaactaaaaaaagaacaaaccagacccaaagttagcagaagaaaggaagtactaaagattagagtagaaataaaagagactagaaagccaataccaagaagtcaacaaaactaaaagttaggttttttaaaaatatcaacaaaagtctggccaggtgcagtggctcatgcctgtaatctcagcactttgggaggccaaggtgggtggatcatctgaggtcaggagttcgagaccaagctggccaaaatggcaaaaccccgtctttaataaaaatacaaaaattagccaagcatggtggcaggcacctgtaatcccagctattggggaggctgaggcaggagaatcatttgaacccaggaggtggaggttgctgtaagcagaggtcacaccactgctctccagcctgggcaacagagcaagacttcggttcacaaatcaaaacaaacaaacaaaaaattaacaaaatttgcaaacctttagctagatcaacaagacaatagagaagactcaacaaaattcagaagtgaaagaggagacattacaaatgatgccacagtaataaaaaggatcatactgttatgaacaattatgcaccaacaaactggataacttaaaacaaatggattaattgctggaaaaatacaacctaccaatactgagttttgaagaaatagcagatctgaacgatttgtaactagttagtagattgaatcagtaatcagaaacctcccgacaaagaaaagcccaggaccaaatggcttcactagagaattctacgaaaaatctaagaagaattaacagaaatccttcacattttccaaactttccatgaggccagcattatcctgattccaaaactagacaaagacactacaagaaaaccatagaccaatatacctgaatattgatgcccaaatcctcaacaaaatactagcaaactgaattcatggcacattaaaaggattatacaccataaccaagaggaacttactcctgaaatacaagaatgtttcaacatataaaagtcaatcaggctggagcagtggctcatgcctgtaatcccagcactttaggaagcctaagtgggcagattgcatgagctcacgagtttgagaccagcctggccaacatggcaaaaccttgtctctataaaaaatatgaaaattagctgggcatggtggtgcatgcctgtattcccagctacttgggaggctgtggtaggaggatgaattgagcccaggaggtggaggttgcagtgagccaagatcacgccactgcactgcactccagcctgggaaatagagccagatcttgtcctaaaaaaaaaaaaaaaaaaaagccagttaccataatacaacacattaactgaatggaggacaaaagccattgatggataaaaaatatttgaaaacttcaacatgcttttgtgagaaaaacactcaacaaacaaggactagaaggaaattgcctcaacataataaaaggccgtatataaaagcttacagcttacatcatacccaatggtaaaaaactgaatgctttctaagatcaggatcaaggcaaagatgcccacttttgctacttccattcagcatagtcatggaagtcctagccagagcaattaggcaataaaaagaaataaaagttatccaaattggaaaggaagaagtaaaattatctctattcccagatgacatgatcttacacgtagaattcctaaagattagacacacacacacaaactgttaaaactaataaatggaccaggtgtggtggctcacgcctgtaatcccagcattttggtaggctgaggcgggtgggttgcttgaggtcaggggtttgagaccagcctggccaacatagcaaaactccatctctactgaaaatacaaaaaaattaggcaagcgtggtggcaggtgcctgtaattccagttatgcgggaggatgaggcatgagaatcatttgaacctgggaggcggaggttgcagcaagctgagatcgtgccacggcactctagcctgggcaacagagtgaggccccatctcaaaaacaaacaaacaggccgagcacggtggctcacgcctgtaatcccagcccttggggaggccgaggtgggtggatcacaaggtcaagatatcaagaccatcctggccaacatggtgaaaccccgtctctattaaaaatacaaaaattagctgggcacggtggggggcgcctgtagtcccagctactagggaggctgaggcaggagaatggcgtgaacccggaaggtggagcttgcagtgagctgagatcactccattgcactccagcctgggcgacagagtgggacgcagtctcaaaacaaaaacaaaaacaaacaaataaacaaacaactccccccccccccacacacaaaaaactaataaatgaattcagcaaagctgcaggacacaaaaacaacatgcaaaaatcagttgtgtacctatatactagcaacgaataattaagaaaaaaatccaaggaagaaaagaaaacacttccacttacaatagcattaaaaagataaaatacttaggaataaacttaactaaaaaggtaaaagacttttacagaaatcactacaaaacattgctgaaataaatgaaagaagatacaaatcaataagaagacagctgtgttgatggattgtgagacttaagattgttaaaatcctcatactactcaaaacaattacagatttaatgcaatccctattaaaatatcaatgttattttttgcagaaatagaaaaacccatcctaaaatttatacggaattgcaaaagaaccatgcatagccaaaacaatcttgagaaagaaaaacaaaatgggaggcctcatatttcctgatctcaaaacattctacaaacctacagtagtcaaaatcgtgtagtactggtataaagacagacatttagaccaatggaacagaatgcataaaacacaaacaaaacctcacatacaaggtcaaatgatctttgacaaggatgacaaggctgcacaatggggaaaggatagtctcttcaacaaatggggctgggaaaactggatatccacatgcaaaagaatgtagttggacccttactctagatcatatacaaaagttagctaaaaatggaatagaccaaaagtaagtcctgaaactataaaactcctcaaagaaactatagaggaaaagcttcatgacattggatttggcagtgatttcttggatatcacaacaaatgtgcagacaaccaaagcaaaaatggacaagtgggactataccaaactttaaaaagtaggaaaggaaacaattgatacagtaaaacagcaatctatggaagtggagaaaatatttgcaaaccatatatctgttaagggattaacatccagaatgtataaaaattcttacaactcaataacaaaaacccccaagtaccccaatttttaaaatgggtaaagaacttgaatacatatttctccaaagaagatatacaaatggccaacaggtatatgaaaatgtgctcaatatcaaggtgctcaacatcactaatcattaaggaatgcaagtcaaaaccacaataagagcccgggcatggtgatgcatgcctgtaatcccagctactagggagactgaggcaggagaatcgcttgaacccaaaaggtggaggttgaagtgagccaagatcgtgccactgcactccagcctgggcaacaagagcgaaaactccctctcaaaaacaaaaaaacaaaacaaaaaaaaaccccacaataagatattacttcatacctgttaagatggccactataaacacacacacacacacacaccccaaaaaaacccagaaaataaaaaccgctggtgagaatggggagaaataggaacctgtgcactgttagtgggaatgtgaaatggtgcagctgctatggaaaacagtatgcagtttccttaaaaaattaaaaaatataattatcatatgatccagcaattctacttctgggtatataaccaaaagaacataaagcagactctcaaagagtctagtttccacccagtaggtggagctgacacatgggtattgattagaagtctataaaaagagcagtcctaacccctgtcctgtgcagccaggcagatagcccatcccctgaccccactggagatgggaggcttattccctggagaaattaaaccaaggaaacttcagactttgagacacagacacattaaagaatatgggtgaagaacaaggctgaaaacaggagtattagaagagtctacattctgtatagtgagtctccggctctctttcccagaactctcgtatttataaccccacacaggaggtatctgagataccttctactctcttaccccaagtaaccaatttaccatcaacttccagtgaatttcacctctacaatatctctctaattcatttcttccagcacctgctattgtgagctagtctcaattctcatcaggacaattgtagtagtatccaggcttgttctcctcctgtccattcttcatttatgggtagagccaaatctacttatgtcacctgggccctgtttagcaccttttaatggcttcccattgtttttttatttttagttatttattttgagacagagtctcgcccttgtcacccaggctggagtacaatggcccgatctcggctcactgcaacctccgcctcccgggttcaagagattctcctgcctcaccctcccgagtatctgggattacaggtgcctgccaccatgcccagataatttttgtatttttagtagagatggggtttcaccatgttggccagctggtcttgaactcctgacttcaggtgatatgcccacctcagcctcccaaagtgctgggattacaggcatgagccactgtgcgcagcctgttttttatttttacaatttatttatttatatttaaaaagatgccatgtgacactaacccattgttttttaaatattctcttgagtatactaaattgacacatatcatctgtaaataataattttgtaagttccttcatgtaactcttatttccttttactttattgggtaaaacttccagaacaatgtaatgaattgtggtcatggcatgtattcttttttttgtttctgattttaatatggatgtctgttgtggtttgctattatatattacattttgctaataatttcaattaaatgctctcagtttactaacttttagaatcagaaacaaatgttgaattttatcactctattttcagcatgtattataattatttatattttttcttcttagcataataataaaattcacttaaccagcatttactaagcagatggtgccaggcactgtcctctgcactggaggtaacagaaatcaacaagaaagtcaaagcctgtgtccttccctggcagagggtggaagggcagaaggaacgaacttcctccctcaagcccttttttttataagggcacctagtcctatacagggggtgccaccctcatggcttaatcacctcctgaaggcctcacctattaatattgttaaattgggcattaagtttcaacatggattttggagaggacacaaacactcaaaccacagcaagtaccatgaagaaaactgaagcaggataagtaggtagaaagtgatagggtgctattttattgagattaagctacaaaaatgtattcttaatgttgaattatcttaatatttctggttaaaaatcctacttgattaaatttcatgcttttcaattcgctaaaattttatttagaaaacttatattggtgttcataaatgaaatctgcctgttttactcttctggattcttattaaggcattttggaatgatatttaaagattttcttttttaaaaatgatttacataatagaaaaaaatttctgatggttttattttatagaatttcccagtaaaaccatctgagtgtagtgtctttggagaggcttatctttgacattttcagtttgttccatagttataggtctagtcaaggctcctaccacactgatatgagtgtgacctataataccctacaggaggaactgatttatattttctggaaaatgtctttatttcatctagattttaatgtattcacataaagttgaatatagcactgtctcataattgcttacatttctttcaatctgtggttttatttttaaatttgcaatgttatccattagttatttttaaaaaattgtgatagactggtcatgtaactcaggggccctgggttttctggtacacactgaaaaagtgcccacttgtaactgttgcaccttgagttcttgttgtttcaaaaagttcctggagaagctcggccccagaaaaacaaaaaacagttggatccagagatggctgagtaggagatgaactttggcgaactcttattgttataatcttaaaaacccggcccagggaggagcttattctccattttctatacaggcgacatatgtagaaacataatccgccgctgtgcctgtgcggccaggactccctctctacacgcaatgattcagctgaccagcccaagacatgctcggttttcacgcctgtttgtaggggcactgctttggggcactacctccggtgtcctccttacttgtttcaagtaataaaatccccttgttaaatcctccttgtttatggtcattgggggctcacctggcaacaaccaaatgcacctattatatgagtagcagctagagttttgtccccattattgggagcattttaaagaactaaagaatcatctcgtttttatttatgaaataaatgactttgttctcgaattcattatattgatttcagtttttgtttactaatccttttgtcctacctttattttgctagagttaattttttttccttttctttttctttttctttctttctttctttttttttttttgagacggagtcttgctctgtcctccaggctggagtgcagtggcgcgatctcggctcactgcaagctccgcctcccgggttcatgccattctcctgcctcagcctcccgagtagctgggactacaggcgcctgcccccatgcccggctaattttttgtatttttagtagagacggggtttcaccgtgttagccaggatggtctcgatttcctgacctcgtgatctgcccgcctcagcctcccaaagtgctgggattacaggcgtgagccactgtgcctggccatttcttgtttattaaaacacgtaaagctgtatattttcttctgcgtctggcattagccctattctgtaacttttactatgtagtattatcatcatgattgagtgcttaatatgttatttcaatttctattttgctattaattaggagacttgtaattttataaaaaatgtgactaagctatctttttgtcattattttgtagttttattgcttctagtcaaagctaccatttctcaaataaattgagatttttctttgtggaatcttttttttaaattttttttgcaaatttttttcttttttttttttgagacggagtctcactctgtcgcccaggctggagtgcattggcacgatctcagctcactgcaagctctgcctcccaggttcccgccattctcctgcctcagcctccggagtagctgggattataggcgcccgccaccacgcccggctaattttttgtatttttagtagagacggggtttcaccatgttggccaggctggtctcaaactcctgacctcaagcaatccacccgcctcagccttccaaagtgctggaattacagccatgagccactgcccctggccttcatacttacttttaattacatatagattaaggggtggtttatgaagaaatttccagaaaaagggtagtaatttctgggttgtcagctcattgccacggaaaagggcagtaactccagggtgttgccatggcaatggtaaactgacatggcacactagtgggtgtgtcttatggaaagctgcttccacctcatccctgctttagctagtactcaatttggtccagtgtccaagctctacctctggaatcgagtcccacctcctatctcggatccactgattgattaggggtggcaatgaagacattataattctgtcattccttcttcatttattagctgaaataattctataaagaaaaatgtcacccatactctattgtgcagaataggcaagataaatacttgactcccttgatcagttttcaaaataatgtgagttggttctttaatgtcccctgaagtgatgaataagtgttgtttctaggtatcattatgaacaaatggatttaaatgattttagatgtttcagtccattgcgatcattattcattttggtgcttgatcattccagctttagccggtgggagcctatttgagttggatcctccatcccttggtcatgactctaatttcctgacaccatccttcctatcaggtatgataagatgttttaagatcatcttgtacatttattctccacacctggaatttgacattttccaaattgctggtccctttttagtagaagaaaaaacgtctggttttttctttaaaaacaattattttgagaggagagagttaatatctaaatttaacttttaaaatatttttgtcaaattaatcaatgcaagtgtatgaaaagtaaaattccggccaggcgcggtggctcacgcctgtaatcccagtactttgggaagccaaggcgggcggatcatgaggtcaagagatcgagaccatcctgtccaaaatggtgaaaccccgtctctactaaaaatacaaaaattagctggacccactggtagcgggggctgtagtcccagctgcttgggaggctgagacaggagagtctcttgaacctgggaggcaaagattgcagtgaggtgagatcgcgccactgcactccagcctgagcagcagagcaaggctctttctcaaaaaaaaaaaaaaaaaaagttaaaattcaaatggttctgaagagctgatcaaccacttttaatgatttcaacagttctgataattaccattgttatgactctagataaattgctactatttgctgttgcttaatttagatatttcacacattatctatggatgtgctatggtagatgatgatttagatcatcaatatcactttctcacggttcctcctcactccttctctcagtagagtcattttttgtcagagcagaattgtaaaagtctgtttgggtgtttctagtatttgcaaggttctacttatttggagctcatgatttctgtcaccattcttagaagttcattccacacacttatgtgtgccattggtaatatgcctttctttctatccttcttattggcaacactctagtctttgctattcaactgactagtcgaagaagtatttaggaggccgaggcaggcagatctctggaggtcaggagttcgagaccagcctgatcaacatggtgaaaccctgtctctactaaaaatacaaaaattaggcaggcatggtggtgagcctgtaatcccagctactactgaggctgaggcaggagaatcacttgaacccgggggggagacggaggttgcagtgagccaagatcatgccactgcacttcagcctgggcaaaaaagtgagactccatcttaagaaaaaaaaagtatttgaagcccatagggtcacgaggagaatcccgtcgagtatttcagagacctgctttcaccttgacattagtttattagtgttaccactctccaactgccattatcaagcccacatttttattttttcatctagttcatgagaacatcatgtgagactctgtaaaatgtcttcctaaaatcaaaatacatcaaggtcttacaattcaattaaaacaaaagtacataatttttaaagctttttattataatttcagttacatttattacaatttcaagtacaaagaactccttaaacttggaaattgactatggagttcatttcctaaaaacattatagctctaacatgcagtttataagcataatttgtgtcatttatttaatacatacaccaaaaataaaaaatatatatgtatttggccgggcacactggctcacgcctgtgatcccagcactttgggaggccgaggtgagcagatcacttgaggtcaggagtttgagaccagcctggccaacgtggtgaaaccctgtctctactaaaagataaaacttagctggctgtggtggtgtgagcctataatcccagttacttgggaggctgaggcaggagaatcgcttgaacctgggaggtggaggttgtattgagatgagatggcgccactctactccagcctgggtgacagagcaagactccatctcaaaataaacaaacaaataaatatatatatataaataaatactctctgattctgctaattcctctaatcttaaacattcctcttttaggaaagtggaccataaaggctgttactgccaatggaaggcatctgggatcctggtactcctctcacccttgtaacgtatatataaatggctaaattggctctttttaaggatatcttctgccaatattagatttttatttttcttgcaactcttggcaattcttgattctgctcaatttagaatctaatttagttatgcagaaacactgacgtaaacaaatatactgaccttttttaaataagaaaataaagatactgttctattgagttgggcttgtattttaagaaactttcaccaacagtggatccttttgtgcggtgcctggcaaactatttggcctgatcctcctggagaaatctgtgagctcaggaagttgtgaagtgggttgtgtgagagttgtatttccattctgtgactggggaggggcgtattcctcagtataaagctcattcttaaaagtaaagagtaaaaccatgcttttaccagcctcaaataatcaacccagggttacacttccactctctttagcagaaaactaacaatgggtgattttgaattaattctctggagggctcagctttaatttaatctttaaaatactacttgaagtatgccaggacactagaggaagtcataagatcttacgggctatcgtgtagtaaatatgttgattatagtaagcactgtcctataactttttttttttttttttttttgagacggagtctcactcttgtcacccgggctggagtgcagtggcgtgatctcagctcactgcaagctccacctcccaggttcatgccattctgcctcaacctcctgagtagctgggagtacaggcaccaaccaccatgcccggctaattttttggtgtattttttagtagagacagggtttcaccatgttagccagaatggtctcgatctcctgacctcatgatccgccctccttggcctcccaaagtgctgggattacaggtgtaagccaccatgcctggcctgtcctataccttaatacttgagcattgtcacttaccaactttacaatagtccatttttagtatttggtccttttctaagataaaggtgagataaaatgagatggattacagaatgattaaatcttaatccagaaaagaaaaatgttgtgaattgaaagagaagctacataatagtgatgataccaatgacactttcagtggtttgtaaaggtcaagctcagcaaattgtttgtaagacttatttctttttcttttccttttttttttttttttttttgagacagagtttcactcttgacgcccaggctggaatgcaatggtgcagtctcggctcactgcaacctccacctcccaggttcaagcgattctcctgcctcggccttccaagtggctgggattacaagcatgcaccaccatacccagctaattttttgtatttttagttgagacggggtttcactatgttggccaggctggtctcgaactcctgacctaaaatgatctgcccgcctcagcctcccaaagtgctggcattacaggcataagccagggctcccagcccctgtaagacatatttctgaacttaaccattatgctgtgtttttaaggaactgttacagtagctgggatttaaattaatagagttcagagttaagttcaaatattttactgtacttcaaagtaaattactcaagttccataataacaatttaaacattaaatattcctccttctactttttatataagaaattattattaaaggagaaaaaagattaagcaattttcctttaattattgcatgaagctcgaaagcacctgtgatcattacttttagctcaaattgcataccaaacaaaagtgtgaatcaaccctaaggaacaactcaggtactgtctgtacttttaatacaaaaagaacattaacatcaagaagaaatgctcaatgcaggtaattctagaattatcaaaatgatcattaggtggatactaaaaataatttttttttctgtattagcacagttctaataacctatagtctctctgtgaaatgcttctgtattttaattttttaaatttttttgagacagcgtctcactctgtcacccaggctggagtgcagtggccccatctaggctcactgcaacctctgcctcccaggttcccgccattctcctgcctcggcctcccaagtagctgggattacaggcgcgtgccaccacatccagctaatttttgtatttttagtagagacggaggttcaccatgttggccaggctgatctcaaactcctgacctcaagtgatccacccgcctcagtctcctgaaatgctgggattacaggcatgagccaccacacccggccttataatttcaatttgaaataaataaagaaaatgtggaatctttgccattaaaatagaataattatagaatcataaagcatgataaaatagggaaacactcatatctttttcttttatatgtcaatgatgtttatttttacatgatagaatgaattttcttataatccacagcaaaactattttaaactatgtaaccaaggaagtgtatacatctaagttaaatatttttttctgatatcaaaggtaatacatacccatgaataaaacatttagagggaaaaaaaaccagaaaagcattttttgaaagaaaataggtggctcatgcctgtgatcccagtgctttggaaagctgagtttggaggatcacttgaggccaggagtttgagaccagccagagcaacatagtgaaatcctgtcttaaaaaaaaaactaaaacaatattagcctggtgtggtggcctatgcttgcagtcctagctacttgggaggctgaggtgggaggattgtttaagcccaggaagttgagggtacagtgagacatgattgcgcccctgcactctagcctgggcaatggagcaagatcctatctcagaaataaataaacccagaaaataattgccacaaatagtaccacacttagagatcaccaccattaaattaagctttaagggcaatacaatgcaaatgagtaatttctctttttctctttctttctttctttctctttctttctttctttctttctttctttctttctttctttctttcttttcttttcttttcttttctttttttttctttatttgagggacacggtctggttctgttgcccaggctggagtgtagtgacatgatcacagctcactgcagcctcaacctcctgggctcaagtgatcctcccacctcagcctcccaagtggctgggactacaggcacatcccggcacgtgccagcactcctggctaatacttacttatttatatttttttgtaaagatagggtcttactatgttgcccagggtagtcttgaactcctgggctcaagtgatctcccgcctcagcctcccaaagtgttaggattacaaggcaggagccaccatgcctggctgatcaatttcttggttcttttttttttttttttttttttttttttttttgagacagggttttgctctgttgcccaggctggagtgtggtggtgcgaacacagctcactgcagccttgacctcctgggctcaagtgatccttctgccttagcctcccgagtagctggaccaacaggcatgcaccatcatgctcagctaatttcaattttttaaattttgtagagacaggattctcaccatgttgccagggctggtcttaaaatcctgggctcaagcaatcctcctgcttcagcctcccaaaatgttgggatcataggcgtcagccaccgtgtctggccatttttgactcttaaagcaaatgagatttcatccaaccttcttgtctggcaaattaacaaatttcctattgaggacagttcatcaatattaaggaaagagtgagtctttataattctaatttctgcttcctggatgagaaatgagaaatagaaaaatatataacttatctacctccagcctggtaaagtacagtattttataggacatcttctagggtatgattgtttgaaatttcctcaatttccaccattttcatgaagactattccgttaattaatagttctcattatttgaaaggtacagaatctctgaaaatcaatttaatggactctgtttataaccttaattgcttttgttgcccttatcaggatttccttcagtttatttgaatttttgcaaggtaaaccactaaaggtgcatgaaaagaagtaattatgcctcctttcctccatccagcttccctttgtacatacccagaaattgcatttcttcccttctatctcctcaatgtcactttaataggaattcctatctttttgttcttgttattgttaaatagggtccctaccagacctctggcactccaggctcctctcatctattatatttccttatttctgactgttcttcccttttccctcagagatagtagatgtcttcattctctcttctctcagtctcgctctctctctctcattttctctctctctttctccagcttctttacccacatttctgttgctatgttgtcctcacagttcccaatacttccagcagtgcgggcaggatttctgtaccaagctggcacaaacggcccaagaagaaaggtggtcactgggccagcctcattagagaactgtggtcagaatggcctgtggccagtctggtcctagcaaccagccatcaaactattgtttgtggcacagaatctctttaacgagctgttctttgcacaaggaaatacaccaactgcaaggggacttgctactggaaacagattttcctatagtggtgacagggatgatagtcaaaatatagaactgaatccatcaaagcactggaatttaatccagctatagtgccgggagcaggatcctggaggctccctgcttatccagatgttaacactatgcttgctagatcatgtgaagttttggggcaggggaattcaagtgaggaataagggtggatgtcagggagggcataagagagggtcgggcagagacttttaaatcaataaatatcatagtattttagtattttaataaacagaggctgggtgtggtggctcagcactttgggaggccaaggagggcagatcacctgaggtcaggagcttgagaccagcctggccaacatggtgaaaccccttctctactaaaaatacaaaaattagccaggtgtggtggcacagcccgtagttccgttccagttactcaggaggctgaaagcaggagaatctcttgaacctgggaggtggaggttgcagcgagccaagatcactccactgcactccagcctgggcaacagaacgagactctgtctcaaaaaaccaaaccaaaccaaaccaaaacaaacaacaacaacaacaaaccggttcagctgaattttgcacaccaggtcaatgtcagccttttgggccataagtttgtcctcactcatgttctgtcttctgtttctccttgagaccaaaacacacgtatctaagtaaatatccccattttacagaagaggaaattgagacccagagaggacaagtcattaggggccaggtggagctcagatgtaaagccagaactgactgatcccaaagacaatgctgttgggactaaaattgttacacaacagtattcattaatgttctttaacatttgctaaggactcttgtggatatttttcagttcttatggcaaccttgtgaagtaatgtgggtattactatcaatctctttttaccctaagataatagatacaggtttgggaaacccaaggtttagagaagtaacttcttcagagatactaaaagaatgaacaaaagatagaagagctattatgtgatagaatacatggactcacatatggtcataatttctggtttgggaacctcttctctgccaccacaccatgccaccctgaggtctgtaactgtacatttcttagagtaccatctcaacaatgcctcaacaatacaaagatggctgtaataatttgtggccagtggttagacatttagagttattccttccggcactgggttggcactcagccaattacattcttccacatgattttccttaaaaccaatagcaaaaaaagaaacaaaaaatggcaagcaactgatggtcacttaactgggatttgaggatatttgtggccatgtgataaccacactacttagagtaacactagctagatgtaactggctagatgtaactacattagctaaagtaacacaaattagatgcaataaccacgttaactagagtgaaactccaacttcagctctaaaattcatgtgttttaggaaccattcatgtaagtttggaacttctttactgggagtcatattttgaccttctatcaaatgctttatttatatacaaacaagtgaaatctttgttatttcctttatccaatattctagactgagtgtaaatgtcacttcttccttgaaacattctttacctgccctaggcagaactagccagaccctcttctgtgactaaagcactttatacgcaccttaactgtagtccacctaaattgtgctgcagttatttgcatttcaggttgacctaggaggactctgtcctagtaatctttctctccccattactacattacgtttgacacatagtagctatccaagaaacaattgttgacttattaactaatgtatacacacactaagaaaataaaattcatgttcacatagtttgaaaagaaattaggtgttgccatttttagtggtgggagtggagtgagggtaacatttggtctttagtgataccatttttagtggaggaaactgttatctgtggtaacatttggtctgtcttggaactttatatttttgattaagcaaatacggggaatgaaggtttagcagctctcatattttattataacatttacaaatctgtttattgcattatttcacatgtaatttcaagaaagagttcctgatgtaaaagcagtattcagcaacttaatttaattaaaattatatggatttttaaaatgatgatgtcggtctgtatatattaacatggaaagacatctatgatacattgttaagtgaataaagagcaagttaggaagcagcaactaaagtatttgttcgtttttgtaaaaaaataattctatggagtcttagaaaatattccagaagaataatattggagtaataatattatttttatcctcctccttgcttaaattttatatcctttgaccaatatctccctaatccctactcctcccacatatcttttctttataatgaaagattacagtgttccaggtatgaaactaagtgtcttcccacattattttaatcctcacaataactccataaattcattcataattaattaattaattcctcattcaacttataattcttgtcctaggcagtgtgttaaatgttagagatatagcagtgaacgagaaggatgcggtacccaatgtttcatcattatcctaactttacagatgaaaattagtaaggttgccccatctacaaggggtcttccagtccaacttctggttcaactaaacatacagactcacaggacacccatgggctttgtcgccaccagtgtatgaagacaggtatggcatagcatctggactttttttctgtgggatttttttttttttttttttttttgagatggagtcttgctctgtcgcccacgttggagtgcagtggcacagtcttggctcactgcaaccttcgcctcccaggttcaagcaattctcctcctcagcctctcgagcagctggaattacaggcatgtgccatgacgcccagctaatttttgtatttttagtagagacggggtttcaccatgttgcccaagttggtctcgaactcctggcctcaagtgatccgcccaccttggcctcccaaagtgctaggattacaggcatgagccaccgcacctggcccaattttttctgtgggagttcttacagcagagttcatacattcttccaggaaccaccatctttggtccttcagaagatggctcagatgcaaggagatgagacccacattgggtggatgcaggagccaccctgacgtaaaagcctcattctcaatgtaacaactccataggcacagtatccagtgtccccataagaagtactacccccatctggtatttatagttcatgatcttttctcccaattcaaaggcagtttgccaatcagaggtcatttctatcagaagcaagcttaactaaaaatatagttagcattttatttctatcagatcaccagggaaacagaactagagagtgaaacaaaggtcaaatttttcatgcagaaggaggtgaaagggttttgttaagtagcttattcaaaaaacaaatgaaagagtggattcaaacttaggtctgtctgactgcaagtctagcttctgaacttcactggatagtaacaaatgtgatctctggggggaaagcttttagaaaactttactttctttttcatactttctgatttctcagacttttttcataatcagaaaaaaatggttttcatagtaaagactatagcaacatgaaaatatgcttttgctacagcatgaagtgaaagtagccagaagcaaaatgatatatgcaattgcattgtgattaggatgatgtaaaaagagaaatgcacaaagaaagaagccaagcaaaagtacaaagcagtcctaatagtagttgaatcaagatggttggcttggaaatagctttttttcccctgttttccagattttctatgaaatggctatgttattcttggaataaaatggaacgcatttattaaaatagaaaaggaattacatttagcttataaaatatttgaaaagtaaaaatcatgcaaacatgtcaccctaagataatagacagtttcatatttcttcatataggtgaatacattttatataaaatttagctgttgggggttcggaggcttctgctgtactcctgccctgacaccactgtttcagtgcattatggtaacctccctagactgggttcatgcagcagagctggaatactattgctcaactcctttcacatgctgtctatagttatttcaggatggagctatttaaggtttcattttccttcaaaactcacgttttgggctttacatgatccttctttagccaaggactcatataattggatagctgctgttatattttgcacgccaaaatttccaaatagcaaagcgtcagccattttctccatagctttcaagtttcccatgtcagctgctttggcaaaaagtaggtaggctctgtttcaagaatataaagtcaagtttgattttcaaaaatgaaattttcttctccttcttcaacactattcatactacttctctctaacaagcaggaaccagttgtcatacagtttagctgaagttcattacatctctagatcagtagatttttttcattcctaaagcagtctaaggctataatttcaaatatatctcacaaataataatgctactaaaaaggagaaatatataacatacaccatcttatacactgatacagaaatatataagatacaccatcttatacactgagtaagcttatacactgagtaaagtgaaaaattgaggaactttttctaaaatactgaactctcccatggccaccaccattatttatgaatatttgttttataaaataaattctgaaaaatataagaataatcaaaattggaatgtaacctctaggaagttactatcagaagaatgatgatcccttcatatcttaatttgctaaacagaatatattcttcaacacagcaaagtcagactctttggaaaaacaataatgaaacaaaaccttaatggctagggctctagagtctgactgcctggttcaaatcctggtcccaccacttactagttggagaacttcagccaagttatataacttttctgtgaccctctaatctatgaaatggggatagcattatagcacccacttcatagggttgctgtggagattaaatgagataatccatgggaagtgcttggcattgtgcgtggtatagagtaagcactcagtaaatttagctgttattattgggacagttgcattgattctaaagttttatagcatggtaattgttctcctataattaggtggtaagtagtgtgaacatttagtgattaaaatgataggtgccacaggattaccttacactgcactcttcgagacccagtcagaagccatctggacctgattggtataagaagtgatggagagtcttgcaaggtcaaaacatgtgtcagagacagggagtattttagggatttatttttacttttataacttcgttttgaaggtaaagaccagaaagcgttaacttctacctgtgaccttgactcaaatacagggaaaaaaaaccccataaaaatctaccattgcttctgatttaggaggatcaggagactcacctttatgtacagcccatccatgctgaggctaaaataagctgctcttgggcagaagctggagcagagtagtccaggcaagaaggacctcagacagagaaacatccaggtaggcattagaatcctggatgtcaaaacacagggtgagtactccagtggaacaaaaagagatagaaaactggagttcaggagatcaagaaagaaattaacccaggtcaaagccagctgaaattctggaggcgggaaggcaaacaaggcagatggtctcaaggtcactaaaggcaaatgtctggcacccagagagaggcaacaggaagagagcctggcatcaggatacagactcccttgagcctttctgtcacgtggcttgctgctgcaactctatagcctactgggacaggaggagcaccagcatggaccaaggcacagaaacctgagataggctgcaggggcctccaatagtacgcctagtagctccagcattttatacacagtctctggacccagagggcagcaataggctgcaaaacaaatccttctaggtgtcttgcattccaagggcagtgtgggcatatgggttccatagcagaaaacccaaggcactaaaagggatactagaagcagtatccagggctggagaaagttgctgataggtaagattaagatgtgggctgcaatccccaaaaggaaaaaggtgggagaagctgggcagcaggggcagatcctaaaagacaatttaattagttatctgaatggtctctacagggtctggcattggacgcttaggtgggtgatgggggaggaagggctcaatgcttctgcagggcacatcagaaacttggtgtagaacaacggcttatcttcgaaacttctttgctgatggggagtgattcttaatgaaggaccactctagctgtcagtgaggcttcctgactcactcagacaaatttgttctctctgacacgcttgcttaatatctgtactttaaacagcactgacttgttcagtgatttttcctactcatacaaaagaagaggctgaatgagtgaataaatgaatgaatgaattggtccaggatgtgggtgtggaggagccaaaaggatagttttaacctatcttacatctgtcctgccaacccaggaagtagcaaagcaaagagagggtaggatagaggaatgagcgggaatgaaattattctcctttggtcaggagggtgtgcaatcatttttctctccacctgccctatgcttaggcatggctgcacagatgtaacttgtttaaggagacagcaggccatcctgataacacaagaacttcacccagcttgcccagaaactcctgagatctctttctatgagcccattagagttcagttctccattgctaccgactcaaaagggtcaggaggctgggcgtggtggctcatgcctgtaatcccagcactttgagaggctgaggcgggcagatcacttcaactcaggagtttgagaccagcctgaccaacatggcgaaaccctgtctctactaaaaatacaaaaattagccgggtgtggtggtgggcacctgtcatctcagctacttgggaagctgaggcaggagaatcgcttgaactggggaggtggaggctgcagtgagctgagattgtgccactgcattccagcctgggcaacagagtgagactctgtctcaaaaaaaggtggcgggggtggtcaggagactgagttttggggcaaggatgtgggcaggacagtcttggtaagaatagcatgaaactgaatgacacccaggtaggcatgaaggttcccacactaatggatggtctgctattaggactgggctttctccctgttctttaggccaaagaggaaggtccccttcaaggttgagtggatggttacctgggaccttctcagagtgattttgtcccattgggccaaatccagggtttccctggacttgatgtaacacacctagttgggccccttctttgtgtgggctcccatgctatagttaggggtcatctgaaatctcagggaccagcccctgactggcgctccacatctgtttcttctagctaggctggctggagaactctctgttcttacttatttagccagtgggcatgttagtgagatgagctcctattaggctggattgtatttttgggatctgattttaccccttcctcattataacagcccccagggacattcagtgggaggcccaggttttgctgtggttggttgaaccaccccctcacttctttcttgtctcttaggaagtattacatcatctttttgactctccatttccttcttgtaatttggagataattatctatgtctcacggtatcactgtgagcaatgaataatttacacatgtaaagtacctaaaacagtaactagcacaaagcaggtgcttaataaatgaaagttgttgatgttgtcataaccagaatcatagttgagtgctccttatcctctgtatttttatacttctcaaaggtttgggttttaagaactcatggactttgttgctgccctgtctggtgctagctaccacagctctgggatgctttcctctgactggtgtgcctattctgtgtgaaaacaagagatgtctccttgttgggggctcagggcccatactttctttatttctttctttctttttttttttttttttttttttttttttgagatggagtctggctttgtcacccagaggctagagtgttattgcatggtcttggctcactgcaacctctgcctcctgggttcaagaaattctcctccctcaacctcccaaatagttgggattacaggtgcgcgccatcatgtctggctaatttttgtagagacggggtttcaccatattggccaggctggtctcaaactcctgacctcaagcaatctgctagccttggcctcccgaagagctgggattacaggtatgagccaccgtgcttggctagggcccacactttctattattggttcaaaatacccttgctttctttgcccccataccttcaacttagcagttaggggactcaagataaaactaacacacctgtatttcctggttactaagtgtcaggcactattgtaagagcttgattgcattatccgggtcacagagaggttgagtaacttatccaagtgcaaacaaccagtaaatgagagagctaggatttgatcccaaggctttagctagagccttgaggggtgaccacaggttgtgcccctccactggaagtgtggagtggagggagaagatatttctgcctcccctttagacaaggtagaaaagtgataagagaaacagtgaacatggaacaagaccatgtggccacagcttggtcacctcccagctatctgtgctcacctcactttaacatctttgaatctctgtttccaacttcttaaaggagaaaaattaagctcttcttaccttataagactgttctggggataacatggaatcacatacatgaaagtgcttttaaaaatcataagatactgtacaaacacccaggcagaagtaaagcatttttaatacaacaacttgctctaattcaaataacacattttatttcacttgaatcatctaataaattaaagccaaaacaatatttctgcatgaatgctcaggtcagtgtcttaattctcaatttcacttaatacggggactgcaatctcacatgcagttctcctgtttgtttagagtgataatttgtgggattctttaaacacaatttgatccttttaaaaacaatagtttatgggcaaataggcttactcattatcccaatgagttttaatgataaactacatttgggatttttcttttttcttaacctggaaattcaacttggctaaggtcactggataaagacttactcttctttttgtttttggcttttagactgctggagaaccttgatgcccatcttaaatagctggtctccttcatctgtaaaatttttctctgcttgcttttgtactatacatgaacaaacaaaaaataaaaacaatattacttctatgttccatattttaaaaataatgtgctaaagtaatttgttggcatattagagttctgttctacttattttttaaacctctgcattcaagaagatctgttaatattatttcttagctgaggagcgtcggtaggtcagaaggctgaagctgcctaaaaacttattccctgctggtttttgtgaaaggatctggaaggtgaagtagaaagagagatgctcctgatgggagaagggatgcttttggtctagggaagggatacaaggttctccgatcagaaggcaggagatgcctggtatataagaggggcaggatcttagccctggctggcaaagactctcttgtctgagcatagcacagtaaatcccagagccacaggattccaaaaaaacatgaggacatgggcaacaggcatctccaagatgaccagtgtgcacctaggagaggaggagggaattgctttataaatttccttggctgggcgcggtgactcacgcctgtaatcccaacactttgggaggccgaggtgggtggatcatgaagtaaggagttcaagaccagccagaccatcctggccagggtggtgaaaccctgtctctactgaaaatacaaaaattagccaggcgtggtggcacacacctgtaatcccagctactcaggaggctgaggcagagaattgcttgaacctgggacgcggaggttgcagtgagctgaggttgcaccactgcactccagcctaggtgacagagcgagactccgtctcaaaaaaaaaaaaaaatgttattggccaggtgaggtggctcactcctgtaatcccagcactttggaaggccgaggcaggcggatcacttgaggtcaggagtttgagactagcctggccaacatggtgaaaccctgtctctactaaaaaatataaaaattagctgggcagtggcgtgcagatgtagtcccagttacttgggaggctgagatgggaggatcccttgaactcaggaggcagaagttacagtgagctgagatcaggccactgcactccagcctgggtgacagagcgagactccgtcccaaaaaaaaaaaaaaaaaaaaattctacctaaggcttttccacctcccaggaccctttctaagacttaggggaaggcacagagacagaatactcatgataacttgcctcgtaggatgagggctcagaatcagttttgcagaattcaaggaaaatgaagaaattaaattttacctgctacagtgatattttccaaacgtttatgtaacactttgcaatttttaaaaaatcatcaccagtttatagttggggaaagctggttgtgggaagagtcacacttaaagatataaagatccttccaccaatgtgtgcatatgcacacacacactatttttctctctctctcacacacactctcacatacacacacacacacacacatacagccttttataacatcacagtgcctcttgaagtccattacaacacttagtaaaatctttgattagaagaaccacgcttgaagccatttcaaaggaaaggcatttgggatttgatgcctcattaacaagaccacaaagaacaagtagctcttgttttttatctttctgacaagcaatcagagttgctcatttttctttttaaattaaatttaaaaaattaaaaatttaaaaactaaaaaaattcttaactgaaaagcctatttaaaattattttgaatacttcacactatccaaccaatttagtaataccaggcactttcaggatctaatttctgctctgagttatctgttacctatacttctaattaaagggggaaaataatggagaaaacctaataatctgtgtgtggaataataatagctcctatgaaaatgcttttagagagtgaaaataaattttgaaagattggctctgtatacatatacatatgagaaatgattttaccaccacaaatttctacctatggcttttacttttatttgtaattcttttttggctttccaaatgtattggaattcaattattcgttttcttcactctgttgccccggttggagtgcagtggtgcaatcttggctcactgcaacctccacctcctgggttcaagtgattctcatgcctcagcctccgagtagctgggactacaggtgcatgccaccacgcccagctaatttttgtctttttggtagagatgtggtttcaccatgctggcctggctggcctcgagctcctgacctcaagtgatctgcccaccttggcttcccaaaatgctgggattacaggcgtgagtcaccacactcagccgctgtttattaaaatactaaaatactatgatattgattgatcaaattttctttactataagagggtccagggccgggcgcagaaacagtcaaaataaaaagggatatgactcacctaatgggaaaaatgatttacaggaaacactttcaataatgtcaggtaaataaagtattactttcaataaacaacccattgcttaaaatacttgtaacaacttgcaataaatttattttaaagcaaaaaaatgtatttatggaaccgtttttcaaatttttcatccattgatattaacttgtgttctctgtctcatgattctgcatgtttgtagctttgagaagcagtatgagcacagactcaaatcagactgcctagatttggaacgtcatttactagataccaactatatagccttgggaagattatttaacctctcagtgcctacatcacctcattgtaaaatgggaattataatagccccttcttctcaaaggcagtgagaaaattaagtacaagaactgaaacctgcctagtatctaagtgctttataagtttcagctcttattccaacataattgatattgcttttgattcttcacttgtttcatgaaccatatttctttctgctaaattaaaggtttttgaaaatgaattaagtccttgtaccaaatatacaataatgcattattatataattaataaataagaacacaatccctgttatttcaaatcttgctgaaaagagattttctttctacttttaatgcaattttttttaccatttctcacaatatgactggagttatttatgtttgacaatgatctggagattgcgagtaaacctgattattgtaaatatatttgctcttattcaagcgtatttgagtcgattgcatctttatttgactaaactctttgctgagtcattctttcttggatgaaatgttatttttagtaatggatcgttattcttcttccacatctaggattgtatcttcctgacacacataagggcaaatgtgaagaactcttctgatgcattattcacaaaatctgaagctgaagctggtttatattaagcacaattgaaatcagattttaaaaaaaggatgcagtgtctgtgtaggctagattttccgcagaggaaaataatttcccatttttatccctttgtatcattttaatgatgaaagcacctgatttttagtcagactatgatattcacctcgctcacttgttaattttttttagctctatatgatcctttacgtggtttgtgatgtaaatataacttgagattcaaaatactggaatgtgctatctttttccttttatttttctagatagtattgattgatttgtttttaaacttacgtattaagattttagattttgtggtaaaacatatccaggactgagaaatgcagcacagagcataggaaggaaccaagcaagtatagggtttcaggagaggtttagagctttatagggtggatggcactagagggttactcccttcccacaggtaacagggctgggctgttacatcccgagtctgttagccagttgctacaggccaccaccaggatatcatatttaatcaacagcacttttatttcttagtggccataaaacaatggtgtatcttataacttttgacatcttaaatttgacacaaacatagtatatgaatttgaaacaatacatttctctctaattactgttttggtggcattccacaatttttatgtagcattttcattatcaattataaatattttcaaatttccattctaagttattcaaacaacgtttagaagtgtttatgacactttccagacataaaaggtttttaaaaattgtctacttatggcttgtaattttattgcattgggatcagggagcccagcagaatcgtatagattcctcagtttatgttgaaacttgttttgtggccttgtgtgtggccaatttttatacagtttccatttttttacttaaaaagattatatattcttggctgagtgcagtagctcacacctgtaatcccagcactttgggaggcccaggtgggtgaatcacttgaaccagcctgggcaacatggtgaaacctcatttctactaataatacaaaaattagctgagcatagtggcacgtgcctgtagtcccagctattcgggaggctgaggcacaagaattgcttgaacccggcaggtggagtttgcagtgggccgagattgtgccactgcactccagccttggcgacagagtaagactcttcctcaataaaaacaaaaacaaataaacaaaaaaagatattatatattctttaattattgaattaaattccatatattattaaattgagctttatacattcaaatctttttgattttcagtaattttttgtttgctgaatctaccagtttctaagagatgttaaaaaatcttcaacaattgtggatttgttcatttcctattgcaagactgttaatttttcatttttatattttgagattatgttgatggatacatgcttagaattatcacaacttccttgtgattgttcctttgaacattatgtggtgattctccttttctccctattattgactttaccttgaagtctattttgtctgaagttaatatgagctttcttttgattagtgttgcctgggatatcatttctattcagttaacctcagtttttgtgcatcatgttttaagtatgtttcttacaaacagcagatagtcaagtatggtatttttctttcaatctaagagtatctcttcttcaacttggtttttttttgtttttctttttttttctgggctgcattcaggacaatttcttctgatttttccggtaatttgttaatgttctcttctactatgtctgatcttcttaagccatcctttgatttttaatttggatgaatacacattttctttttctttttctttttttttttaagagacagggtctcactctgttgcctagggcagagtgcagtggtgtgaccatagcccactgtaatctcaaactcctgggctcaagatatcctcccacctcagccttccaagtagctgggactactggtatgtgccaccatgcctggctaatttcttttttttcatagagacagactctcactgtattgcccaggttgttctctaatccttggacttaagtgatcctcccaccttggcctcccaaactgctagggttacaggcgtttcatttttcttaactctggttggttcttttacatggctgcttattcctttgtcaggatgccttgttttcatgctttcttaaccattttaaaatatatttattctgtagacttttgcaggttgttctactctatcaagtcttgaggtgctggccaggcacggtggctcacacctgtaatcccagcattttgggaggccgaggcgggcagatcacctgagatcaggagttcgagaccagcctggccaacatggtgagatcctgtctctactaaaaatataaaaattagccgggcatagtggtgcgcacctgtaatcccagctactagggaggctgaggtaggacaattgcttaaacccgggagaaggaggatgcagtgagcagagattgcaccactgcactccagcgtgggcaacagagtgaaactctgtacctcacaaaaaaaaatacttgaggtgctatgccttttattgtgtgtgtgtagtcacttgtgtattttctaaaattttcttgtgagtccagtaagtcttcctttgtgggaattgtgagattgtttctctagagtgagtttctgttgcttctgtcaggtttccagagtcattattttattgactgaggaaaaattttatattggtttagaagttttcacccaaaaaatcaggtggcataaattcaaatccaaatctgtatgagggtcagggctgtggttaaggttttaccagggagaggtttttccctgtgagagcttcggtagagaacaagcttccttgatatttgcctacgatggcgggtggtgattggttggttggttggttttccctaatcttctcttttgctgtctgaacagctctatgagactcctagctttattcatagctcttctttccgattcccttctcaaaagtcctaatgtcttttttccttccctggtctgggacttaaaatacaaggcttagcctttatcagctctgactacaactcgccaaaacatcgactacatacttacttttcattatttctaacatttgaggatttcagctccttgtgagcccagttctgcctttaaaaacatttaaagttatgacatactttaggcaacacttttaggtatttgtagcaagaggattttcctattggattaacccaccattttgctagaatgagagatctttagtagtttccttttaaaatcagttaacttacataaaactgtgagctgatttaaagaaaaacttgtagtaaatactaggaaaggcattaatggtgagcaggttgggctccttgataagcagatcctaggagtcagggtttttgttaagaagggaccttcagggccgggagccgtggctcacgcctgtaatcccagcgctttgggaggacaaggcgggcgaatcacgaggtcaggagattgagaccatcctggctagtacggtgaaaccgtctctcctaaaaatacaaaaaattagccaggcgtggtgcaggcgcccgtagtcccagctactcaggaggctgaggcaggagaatggcgtgaaccctggaggcggagcttgtagtgagcggagatggcgccactgcactccagcctgggcgacagagcgagactccgtttcaaacaaaaaaaaattaaataaataaaaaattcaaaaaaagtgaccttcagaaccacatctaaagaagaagttggactgggcagagggagaaactgcgatgcgggctcacttggctgcaagagaaacacctggctgaccccacaggtggagctctgtggcgctaaaatggcctgttagagttgtctcaggttagggttagatgatcctgccttcatactgctgtatcaactggccattggaagtgagctgccccaggaaggaggcatgaccttggctatgcagcactctgtagctgaaaacagtcccttcagagactgactgccaaaggctgtctagagactgtactccagcaattgggcaaatagttcctcgttgaagggggtctgaacagcacttcacagtgtccattccaaatatgccgaaaaataatcaataaaatggaatgcaaatgttaaatttagcctagctggtcacaggccccagaagcagcaaaaaggaatgccaagactgacttaagacaaggttccaagatacctcccttcaaccaagagcacagtggtgattgggtatgatcatcaaaattaatgatgattaattctaaggggtgccaggaaggacatggcctgtagtgtcccagtggcctgcaggaataggctccactgttcctactgcatgattggttattgatttgtcttgctaacaatttaatacaaataattattcttttagacttcattctgactcatatggaagaattagttgttgaagttatggtgttaaaataccctgaggaaaagtgaacatgccatttcagaaaaggtaatggatgggaaagcatcatgttcaactataaaatactatccaaatgtactctaaaaacgttaagccttattatttttatgtagcactatattgtaacacagcatacagagaatgctaaatttggagttagatctagtttacatcctagctctctacaaaaagaattcaactcaatgtaattcagcaaatatttcttcattccaactatgcgacagatacagtgccaggcacagatcttgcctttaagctatgggggtataaatgctacttgttatatgtgagaaattctgggtaaagagacaagtggcaaaattccaaaaatggctaaatagttttctctgtttttaaaatgtagagaaatttatttatattctggaactataacttgatgttaatctctttaatttttagaacagattattatatgtgttttgtgagcattccattaagaatatttaatcactaagaattagaaataatttttcagagtaagttaaatcctatttctcttttgtgaaggaccggtaggtctgtggaatagcatttatagaacacctatatctcaagcatatcctgtgcacaaaatgttgaaatgggaactaaatgagaatagagttcaataaggttctgagccagtctgataatcatgtgtgactcatattcttgtttcattccacatttatgaagttcaaactctcctctagggaaggtagcttctccgtggcttcctctactttcttaactcctaactaaataggtactgttcccaagctgtgtcgcatggacccacagtgagacttaatatctctttgagttgtcccaaaaggatatttactcttacaaaacgtttatgaggaatacacattttatctaagatttcatagagcagaagagaagatgagttatcctaggaacaaaaacaatttttaatggtcaccttagacattgctgatttaaaaatatcagttggaatcccccaactttgaagtttcactaacttttcagtttagcgcagccaatcaccatctttcttgctcctcacatctgctgttttcatagttcttctcctgttcttttcttctcaccctttcaaaaacaaaatgtcaacgttcctctccctagttctgtagggcaatgtctttccatccttgaagacttggcatcagctgacaccaggcttctgtgttgcagggaggtgggagagcaggagggggtgtttaccagccacgaatgcttgttaagacatgaccccaggccctcggcacactgccgtataaaggcagtgcacactgtataagacattctagtaaatagaatttttcacccacatcacatgcagatttttatcttatctatatttggtcagatattcctgaccaaataattacaattacccacccaccaataagatacccaatcaacaacaaaattctaaagatttctggtgtattactgcgggccctaggtgctaaatttggcccatcttgctaacttctctaacaagaacatgggtaaaagatcggaagtgatatgcttgtcaaaatttcaaatgacagaaagctaggagagaatagctaatgaattcgttaatgcaatcaataggttggaataatggtccaaaatgaagtttaatccatataaatgtaaactgcctgttaatgtaaaatgcgcacagtgaagtttaatacacataaatgtaaaatgttacacttaaattaaaaaatgtagacaaacacataaggattaggagacacctggctgtgttggtcaatttcatgtgtcagtttggcttggctatcatcctcagttatccaaacaggaatctagttgttgccgtgatgctgttttgtagcaatgattaaaacccatcaaaaggagattattctagataatctgggttggcccgattccatcagttgcaaagccttaagaatggaactgaggcttctctgaggaagaaaaaaattccgcctgtggatagcagcttcagctcatgcccaagagctccagcctgttctccctgagagcctgctctttagatatgggacttgccccgccagccccacaatcgcataagccactcacttgcaataaattcctaagtatagacatctcctactatttttttttttaatctttttctggttgaaccctgaccactacactgacttagtacttttagatgaggacctctaacgttcctttttactcttaagattctgaaacttcacttttactaactatgcttctactgtgtgcccctaaaaggtctttatccttttagttcatgccatctaatctcccctgtctggaaagccaggtgtgttggatatcctctaattgcctttgccttttttttttttttttttttttttttgagacggagtctcgctctgtcgcccaggctggagtgcagtggcccgatctcagctcagctcactgcaagctccgcctcccgggttcacgtcattctcctgtctcagcctcccgagtagcttggactacaggcgcctgcaaccacaccctgctaattttttgtatttttagcagagacggggtttcaccgtggtagccaggatggtctcgatctcctgacctcgtgatcctcccgccttggcctcccaaagtgctgggattataggagtgagccacgtgcccggccttttttttttgagacggggtctccctctgtcgcccaggctggagtgcagtggcgcaatctcagctcactgcagcctccgcctcctggccttaagtgaacttcctgcctcaacctcccaagtagcttggattacaggcacatgccaccacacccggttattttttgtaattttggtagagacaaggtttcaccatgttggccaggctggtctcaaactcctgagcttaggcaatccgcccacctcagcttcctgaagcgcttggatgacaggcataggcaatggccaccggccttctgattgccattctagatcccactccatcctgctctgtgccttgggactctaactcctaaggaccacaccacatcaatggactccctttccttcctgcttctgaagagatttgcttgaagagcatcactagcaggaggtatgaagggtaagcaggaagtgaggtggggctgtttcttccctgcctcctcaatccgggtctctgcaggctggctttgtccttgacttgagaccatagttctgtcacagagccttctccacatacctctggtagccactactgccctgtggcacttcagggccatggggtggtaatgccagtcctgctactggccccagggggaactttgtggtttccctatatcctgtctacgcctttagaaataaatagtctctttattaaactcttctcagatgactcaatttaaatgtgctatttgtttcctgccaaatccctaacttcagttagctaagcatgtcaacatttcgatgtcatatctagagccaattcttcaaatgggcagtgaaccagtcttttggagctaaatgtgaggaaaaaaatacgcttaaaatattaagatttaaaaacttgaaaatccttgtcaaagctggactctcagaaaaaaacagagactaacatcaatgagttcatccagccccaaaactattctctttcttctccataacccatggttcataacccatggttctcaatttctatctattgctcttattagcagtgatcacttttctgtatttacttgtgtcagaagaacacattttgtgattatcaaccttccttattatcatcagcacaaattctgaatctaaaatagtgggtaacagcccgggcaacatagcaagccctcgtctctactaaaaattaaaaacattagttgggcctggtggcacacacctgtagtcccagctactcagaaggctgagacaggagtatctatttttttttttttttgacggagtctcgctgtgtcacccaggctggagtacagtggcgcgatcttggctcactgcaagctctgcctcccaggttcatgccatcctcctgcctcagcctcccgagtagctgggactacaggtgcccgccaccgtgcctggctaatttttgtatttttagtagagacggggtttcactgtggtctcgatctcctgacctcgtgatctgccctccccagcctcccaaagtgctgggattacaggcgtgagccaccgcgcctggcctgacaggagtatctttgagcccagggtgtggaggttgcagcaagccaagatcatgcagctgcactccagcctggataacagagtgagaccctgtctcaaaaaaataaaataaattaaaataaaacaaaggtagaagactgcagaatttaatgcttttgtgtgtataaatatttatgactatatcctaagacttctcagaaagtagctctaaaatttgattttatattgcatgtagtcattttaaatttacatgtgaaaagatattctacttacaatgattcttatttctcttcaagatatctttattttgaattccttttattcttattttacgttgattcttctttttctccaggagattttctcttttattgattacattactagatgttctttgttccaatatgtgtgataaatattgtttgatttcgttcactgatacctacaaagaaaaagactgttgctcattttgttcatgtgtgagtttttttcaaatgaaacaacaggaaagtgaaaattcatatattcatggcaaaaatacaagcttaatgcaattactctaattcttgcttttttcaaatcaaaatgacagatggcttacttcactttagaaatccatatgttttatgaataaaaaccttttaaatctattatattgtcatctgaactacagagccaagcattaaaagctaaatgttataaataaaatagtaggagaatttaaccaatttaccttccactggtaagttgtcatggtaatgtcaatcgtgttagctaaaaaaatgaaggcgttgatattgccttacacattacaacaaatttataatgggtggaaagtacagaaaatcttctgactggctttaaaaaaacaatatttcccaaaagtccttttcagaagttatataattacaattaatcttttttaagtagggtaatagttttagcaggttatttctgagtagtagaaaataatgcaggaattaaggtagaaaaagctttatggaagtaaatattcatgatttacctacataattttctgggtaaattatactgaaacattaaaatttttcctttgtcaattattattattattattattattattattattattattttttgagacgagtttcactctgtcacccaggctggagtgcagtgacacgatcttggctcactgcaaccttcgcctcccgggatcaagtgattgtcctgcctcagcctcccgagtaactgggactacaggtgcatgccaccgtgcctagctaatttttgtatttttaataaagacaggtttcaccatgttgaccaggctgttctcgaacttctgacctcaggtgatctgcccgcctcggcctcccaaagtgccgggattacaggcatgagccaccacacccggccctttttgtgaattactacttctaagaagagtcaagactttttgtttgcttttttttccttttcttcagtatagtttaaactttcttttctggcatgcttaaatcctttgaggtggtagcaaagacatcagagcaatgacccaggggccagagcaagcagaaacatgaagccatgtaaaggactttttaaaaacagctttaggctaggcggggtggcttacatctgccagcattttatgaggtggaggcgtccggattgcctgaggtcaggagtttgagaccagcctggccaacatggtgaaaccccgtctctactaaaaatacaaaaaaattcgccaggcctggtggtgtgtgcctgtaatccccgctacttgggaggtgaggcagaagaattgcttgaacctgcgaggcggaggttacagggagctgagattgcgccactgtactccagccagcgtactccagagtgactctcaaaaaataaaataaaataaaaaataaaaataaaaacagctttaatgagatataattcacatattataaattatatattaacccatttaaagtgtacaattcaatggttttttagaatattcacagacatgtgcaaccattaccacagtcaattttagaacatttttatcaccttaagaaaaaaccacaaatcctttagctatcaccttccctgtactcccatcctccctaccccagccctaagcaaccactaatctatgttttacctctacagatttctctattgcggacattcatatgaatagaatcatatagtatgtgatttttgtgtgtgactggcttctttcacttagatttgttttcagggttaatccatgttgtagcatatatcagcacttcaattctttctatggccaaataaaataatatgctccatggctgtcattcagggacccaagcagatattaaatagatactgtgccagcttcaacatgcggattccaaggtctcctggagcatcagtatctagcagacagaaagagaaagagcctggaagactatgtggagaaaaggtttctgttttgttttgctttgtgtcatttggtttgctttgctttcttggtttgctttgctttctttaataggccagacctggaaggggcacatagtgctttcagctactttctttttttaaattttaaattttaactgaaatttattagatgtttagtaagtacataatagctcagtaaacctaaggttttttttttttttaatttccacaggttttgggagaacaggtaggattttgttacatgagtaagttctttcatggtgatttgtgagattttggtgcacccatcacccgagcagtatacacggaacccaatttgtagccttttattcctcatcctcttcctaccctttccccccaattccccaaagtccattgtatcattcttatggctttgcatcctcatagcttagctcccacttataagtgagaacatccaatgtttgcttttcaatttctgaattacttcacttaaaataatattatccagtcccatccaagttgctttgaatgccattaactcattcctttttatgactgagtagtattccatatatatatattccatatatatatattccatatatatatattccatatatatatattccatatatatatattccatatatatatattccatatatatatattccatatatatattccatatatatatattccatatatatatattccatatatatatatgtcacagtttctttatctgctcgtagattgatgggcatttgggctggttctgtatttttgcaattgtgaattctgctgctataagcctgtgtgcaagtatcttttttgtataatgacttcttttcctctgagtagatacccagtagtggggttgctgaatcaaatggtagttctacttttagttgtttaaggaatcttcacactgttttccacactggttgttttagtttacattcacatagcagtgtagaagtgttcccttttcaccacatccatgccaacatctgtttttttttattttttgattatggccattcttgtaggagtaagctggtatcacattgtggttttggtttgcatttcctgctttcagccaccttctattagccccacctaattgcaaggtggccgagaaacataatctatttaggtatctggaagaagagaacatggattttgataagcatcctgcactctctagtatagtggaattatcatatgttattgccatttaactttaacttttcagttcaacaataactagcatctaagttgaggaggcagtacaagtttggcaaatgcctgtgactgtctgatgtttctactggcttctttacagaggtcagtgtttcttgactttgggtttctctctcatcctgaacaacagcagaacacagtcagcgagaccaagtattagggagccttggaagacagagaggctttctctgactctccaaggcatccagagattaaataatttaataacaagcatttttggagcattgctctcagtccctgctctcagagccagggatacagccaaaccaaccaaccaaacaaacaaagtctctgccctcttgcagctgattttctgccagggaagataacagtcaactgataaaaggagttgtttttaaaaagggtaaggggagggaagtgataaaagttagtgttatttgatacagggtggagaagttctatgattacatttgagtagacccctgtgggaatggagggagttagccacgcaaataaacctcaggaagggagttctgacagaggcaatggcaaacgcaaaggcgctgaaacaggaacacacaggtgtgcaaggaagacagggtaactggagcagagtgagtggggtggggagagggggaaataatgaggcagagaggcagcgctggggccaggttcaggattgggagttgtgttctgtgtgaatgggagccctatggagggttctgagcagaggagtgatattaactgaattaaatttcagaagtatcattctggctcatgtgtggagaatatgatatcgtagagatggagtggggaaaagaggccaactgaaataggccacttgagaattgatggtgacagtgaagaaagaagatggtagagggggaaatggtgatagtggttgtggtttgtttctggagatattccggaaacattgctgacaagattttctgttgaagggcttatcatgtgaattttagtttttaaacagcaaatgcaataaaagcatgtttgtaaaactctcctgggcccatctatagactagctatagctcttcatcggagaaagaagctgtgttttgatagtctctgacatcttcacttgccctctgcctcttcacttccctgtatcttgaagctctgaaatagcctttgccaaaattatgacagcgagaaaattatgacattgaaagagatctgacctaaccagctccatcttacttttaacctccaaactgcctttggtcattcctgggtgtgagctaagctaactttgggagaaatgataatagcccttcccaaaaactaaaccacctttgtaaaactaatgaaagcccaccaggttaggaggatgacaggggcccaaattctgctaagatgtaggcatagttcaatgataaccagccacaattctagaggtcacaagatttacaacttccccaatgactcctgtaaataacgtcactattttagaacataagattggccttttgagatgtcttttgaggcccacctgtaccagtgactcctctgtggtccccatccagaattggattcagtgcataaagactgttttccacacccagatgattacatccccaaccaatcagcagcacccattccctaccctcctgcgcaccaaactatccttgaaaatccctagccttggaattttcagggaggttgatttgagtgataataaaactccagtttcctgtttagctagctctatgtatattaagccctttttctattgcaattcccctgtcttgatacatctatcagggcagaagacaagatgaacccattgggtggttacagattcacactggataagtttttctcaagcatccctttgaacatattattgcccaactcaaaccttcagttctcaggaagagcaggataaaatcaaaccactttgtacaaaatctaagattcctcacagtctgacctaaaaatgtcacagtgagcttgtttcttactactaccacacctacacaaacgctggtgacagccaaactcttctactccctgttccacagatagaatagattctttcctatttccttgtttttacttaaatagtttttattgtctcttctttcctgttatctccaatgttactcctgcttcaaggccaaactaaggatctttttccccaagactcctcagtatcactgtgacccacggtgatggccctccctctgaacttgtagtttcttttcttcttggttagcagtaataagacagccaaatgcctaggcaggtgaaaaaggggtcctcggagaatctccaacccgcccaagtgtttatatcagatgcttttgtgcagatgagcgactggagcccgacatgcgcactgggggaagtgggtggagccaggaggaattcgtgccttacaaagtctaggagcctgctctcttcagctggtgtggtgacccaggaaacaatctaggaggtggtgggggctggctagcaggaactccatctcgctttgctgagtttattttttccttttggcccaataaaaccctgctctactcacccttcaatgtgtccatgtgcctaaattttcctggtcgtgtgacaagaacctgggttttagctgaactaaggagcaaaattctgcaacagtagctcactgttctgcattctctaaagctgacctcctagtacatcacatattacatgttttatctactcaattatttatagacactttgtaaacctttgggtatatttctcatgtaaaataggctgccttgaatcaagggaagtttaatgaatatgtgagtttctttattttggggaaacctcttgtttccttaaaggaaggaacgtgtttcacaggagaaactaaaaaggacagaagtctttgaggaaagaaagtttgaatttatcttgctacacatttgattgtaatttatttgtggctaatgtctgctttttattcctagagacacttccaaagtaggacccagtcctatggtactatgcttgaaggcaaaaacaaacaaacccacaaacaaaaacagtgctgggaggcagaaaaccgttttttcttttttcttttctttttttttttttttgagagggagttttgctctgttgcccaggctggagagcagtggtgcgatttcagctcactgcaacctccacctcctgggttcaagcgattctcttgcctcagcttcctgagtagctgggattacaggtgcgcaccaccacacctggctaatttttgtatttttagtagagatggggtttcaccatgttggtcaggctcatctcgaacccctgaccttgtgatctgcccacctcggcctcccaaagtgctgggattacaggcgtaagccactgcgcctggtccagaaaacctttttaatagcttctagtttaagagtctgtcagtcttctaaggctagactttgacttaagagtttttacattgttttgtttggatgaaaattagttttattctcaaaacaacacacaatttaactttttaaacacaagaaactttgagtacatgttaacatataaacatatcttattcacaatcatccattccaattgccaaaccccaaaataaatgttatagattataacaatttgattgacattcctcacatcgtattttctgtttaccatttattagctgtgtctaactgtgagcaaattaacctctctgtgacttactttacccctctataaaataggggtaataaattgcctatctcattgggatgttttgaggatcaaacgagttaatacatgtgaagagctttggacactgcaagcagtcaataaatattaactgttattactatattaactatatatgttttctgtttaaatacatttttctgtttttctgtttcagattctaacatactagaatctgggacctctggctatttaatttgctctgtcagtaaatgcaggtgttctgagtcttggaaatcagtaaacatcatttgttttattgaaatatagtgggttttttctttttggtttgtttgcttgttttgtttttttttttttttttttctgagatggagtctcgccctgtcacctgggctggagtgcaatggcgcaatctcagctcactgcaacctccacctcctgggttcaagtgattctcctgcctcagcctcctgagtatctgggattacaggtgtgtgctaccatgcccggctaattttttgtatctttagtagagatggggtttcaccatgttggctgggctggtcttgaacccctgactttgtgatccactcaccttggcctcccaaaacgctgggattacaggcgtgagccaccacgcctggccaaaatatagtgttttttaatctcttaagcagaatatcttaaaaatgttttactagtagaaaatacttatatgtcatacattttctgaactaatttctttcaaagacactgaacagcaattttagcatatcctaggcccctgtggctgcctaggctgtatttgatgctaaatatttcagcctccaaatcccatacttattctttaatagaatttcaatagcagcaacatgactgatgctaatgggactattttaatagcctccacaaatagttttttgagcggcaacaggtctaaaatagtcatggaatgaaacacccttattcttttttttttttttttttgagacagagttttgttcttgttgcccaggctggagagcaatggcatggtctcagctcactgtaacctccacctcccaagttcaagcaattctcatgcctcagcctcccaagtagctgggattacaggcacacaccaccatgcccagctaatttttgtgtttttagtagagatggggtttcgccatgttggccaggctggtcccaaactcctggcctcaggtgatccacctgcctcggcctcccaaagtgctgggaatacaggcgtaagccaccgcgcctggccaaaacccctattctttaaaagtcatacaaaaagcactgattcactcattcaatacatttatgctaggcattcactaggaattgaagatatagtgacacataagacagaagcattttctgatcatatggagcttccatttgtctgtaagaaatacagcaaccagtaaacaaataaatgaacaagttagtatcagatatccatacatgctatgaagagaataaagcaagaaaatgtaaaaagtcaaatatggggtgaagaggggttggtgcataattttgattgggtgtccaagaaaagccttacagaagaggtgactttggagccaataatttaatgacaaaaaagcagttctgcaaagttatgaaggcagagcattccgggcagaaaggacagtaagtacgaatgccctaaagtgggaacaaacttgtatgttccaggaatggaaataactcccaagtggctgaaggagtgtgagccaaggaaaaaattatcaaagagaaagacacagagagaagtaggggggtgatatcatacagggacatggtaaggaggtggcattttactgaaggacaagaggaagatattgcgatcctaggagacaagctctgattgatgttttagaacaaaagactattctggctgacatgtgaggaacagattatacagcatcatgagtgggagcaggggctgggcgtggtggctcatgcctgtaatcccagcactttgggaggccaaaatgggcgaatcacctgaggttaggagttcaagaccagcctggccaacatagcaaaaccctggtggcaggcacctgtaatcccagctacttgggaggctgaggcaggagaattgcttgaacccgggaggcggaggttgcactgagccaagatctcaccactgcactccagcctgggtgacagagcgagactccatctcaaaaagaaaaagagtgggagcaggaagaacagtttggaaactattgcagtcaactaggcgaaggatgatgtgactcagctgagtgcagaagcaatggagataaattatatgggcagacttagggtatgttttagaagtttaacagtactgactccgtgttagagaaaagctagcttgcttgcttgaatataattattgttttgcttgagtgtggagattattcactaaaacagccttgagaaaacaggaccttcaacagaaataaaagacacgaccaacaactctgggaatgagctgaccggcctcgtaagaacaggttgatggcccctgcagaaggtcaccggcattgacctagaaagcaatgagtaactgcctgcctgagactgtgcacatttcacaagaatgttttgatatcacttcccctcattactcttaaaaatccctgatctagagggacaatttgtaacggtggtctttgaatgctaattcactgccttccccgggtttctggcttcttgaataaagctaactttcctttcatcaaagctcttttcctgagtttttgtctttcaagtgatgagtggcacagttacagaagtggtgcaaataaaaatggagatggactgaatacaggggtaagagaaaggacaaagtcaaagataacttcttgttttggagcgagaccagctgagtgataggagattccatttacagataggagattacatttacagggatgaagaagactggggacagatgagatttttggagggaatcaaagtcttcccccaaccccctaacaagcagacctgtatatgtggtaataccttcaaattgggtgcctatatatgaaacattaaatgtatttgtctaagagtaaagagcgagtcatatttgatatggaatgggaagtgagcatcatccctcacaaatgatagataggtgggaagtaaaagaactggaaggtgagaattctttgcctgccagtcacttacttttcctagggctcaacaatcaaagacatttcttgttttccttaacaatctatgtcccttttttctttcctggttcatatcccccaaaatagtcactgttccttggcactgtgtaatacattaaattctgctgataaagctcttgggaaaaagaggaaatgaaaagtaagagcttatagaaggcatcagtgaggacaataaaagtagcaaaccaagactagctggtcaccttctcaccagtggtctttgtttaggtaaatgaatgagatgctatcgagatataatgtggcagagaacacaggctgctgccattggtttcacaaaagggagaaatgaatttctacttttcccactatgtatagatgcagattccatatactatgtttaaaccactatatttctaaagagtatgaacactagtgccccagacactagtgaagaaagtcaagagcaagtgaaaaacaaagaaaatgagtttttctataagaaaactaggttttcctaggtcattggttcttaaagtatggtccctgaaatctgttagacgtgcaaattatctgctccacctgaggtctacagaaccagaaactctgggagtgaagtccagcaatctgtgatttaacaagtcctccaggtgattatgatgcatccttaagtttaagaacccctgccctaggtaatagtggaagaaggttattagtacatgagagtgaaattgaagtccaacattaaataatacaaaaatttaacatcagtcataatacagtgaagatatgtgtacatatagcaaagactcacatagaagcagatgttttaattatggtttctcatcagaaattgaaaatatgtcagattattagctttctaggtcttaaataaatgcatgtatgtttgaaaaaaatgggggctggcaattttaaactttaaaattaactgttttagtagtttttcctcccttaaaataagagtttatgagatgtttacattgaagcaaagctgtttttgttaatggacttgatgtcttttatttttttcctaggcttttcaattaagaatataaaacaatctcaggatacattttcctaacacatctaagattttttaaaacaaagcaaatatgttagatgtaataaccacccctaagtgaaaagaataattatcccttgtagagaagaagtaactcattcagttacttcagcaaattatcagtaaaaatatttcttcctcttggcaaagccattgcttattattttattgtgtatttgcatatccaccttctaatatcaccaaataagaatagtagacagcttcctaagggtaaattgtgaaatacagggaaatggtaaagcagcaaataaaaaggaaaaaagtggcatgagtgatattaataatacagtgctaacataagatttatattaactgctaatgctttctgaaattcagagaacattaacaactgatacttactggagtctgtatttatattctgtatttacatgcaaggagcagaaaattatagttaaacatatagccatgtcaacttttcatggtacagggaatacatggattatcaaaagagctctgggtttttttttttttttcattactttcagcacttcttttctcttaattttactagagctactgatagtttctgttcattccttgatacaaggattgctaaatgacattcattcattcacaaatatttagcaagcacttattaaattgtagtgactaatcaagagatatttgtatctctgagaactatacaaaaaagtaaagagttcagtttcctttgggggagtcaaatggggagttaagtaatgagcaagtttgtagacacatgattacatgcaacaagaaagcagatgaagacccagtagtctgggagaggagttagaaaatgagggatgtgctattttagattggtgatttaaaaaattcaccaatttttatggacttagaatgggggtgtgcatgctgattggtccgtgggtgggcttgcaaaaagcaccactcagttggttaaaaggcatcatcctgaaggaaccaattaagagagagagagagtaagatgggggtagaacttctcattccaggtgtggactccatccagaaatggcagctcggttttcaggctttaaactctctttggcttgaaggttgggtctcaccagggacctgtccctgtctgcctaggaatttgtctgtcttctattactatcagtacaaaggccctgaggtagacagacttgggtactccagagatagcatggaggccaacgtgactggaatagggtgagtaatggggagtatggtcagagctcagagaaacagcaaatgccaatcatgtaaagccccatgggacttgatgaagagtttagattttgtcttaagtgtaatgcaatacataccgtgaggtgaataggctgcaatagagcaaaaatgcaggagatcagagagttggctaccacagagtccagatgggtgagctggtggagtagttaaaagggattggattccggatatttgaaagaccaagataactgggatattgtgtatgagagaaagaagcagagggtgagcttaagatttttgttctaagcatctggtggatgaaggagccatttactggcctaggagatgtcaggaaaggaacaggtttggagttcagaaaaatcaagagttcagtagtcaacatgtcaagtctcagatccattttacacatcccagtaaacatgtgcctgaagtagtttgtgtctggggttgaggcagtgcaggttacagctgctggtaggttgatagagttgatgatgggtggatatagaattgctcttcaaactgtttccttttttcagtgtgaaaaatacaaagcgttttgctaaatgcatgatgatggtgatttctgaaattggagaacaaacaaaacccaggaaggtcatcagctgagatgtgttggaattttggtaagaagggagaagatatgaaacagtgatcttagagatgtggaataataaatttgactagggagatgttcaggtttgctgggaaacactgaaggcctccttagtctgtggtcatgaaattaaaatgagactggttgcctgattctcttttcccagccatgttcagccacccagaaggaggaattgagtagatggagaactacatttcatcagggttaaggttttaccaataaatgaaatggagtgcaaggggaataactaaatggaagatctatatgaggaagtgatttcacagcaccctgcaatgttagctgcaattcccaaatccaaaaaagatctgaacactgaaagctttttcattagtttggtgctcaaaatcagttggtgtgaaaacttgacctgaccttatgttaggttaattctattctttatcccatttagtgtgatattcttacgtttttctgcataactattaatgaaaacaatgtatttcctgaatccctacttggggtattctataatatgtgaggggtgtgtgtatgtttctctctccctttctctctctcttttacatttgacattattttacattattacacactatgtacattttaatatatacatatatatatatatatttacatttctaaaagttttttaagactttgaattctgcctcacactcttccaaaaaattgcagaggagggaacactttcaaacttattctatgaggtcagcattaccccaataccaaagctagacaaggacactaccaggaaagaaaactatagaccaatatctctgataaatactgatggaaaaatcttcaaaatattagcaaactgaattcagcagcatattaaaaaattatttaccatgaccaagtgggatttttttctgatatgcaaggatggttcaacacatggaaattatgtaatatgtcacattaacaaaatgaaagaggagaaaagcacatgattatctaaattgatgtagaaaaagaatttgacaaaatttgacatgcttttgtgataaaaagcattcaacaaacaaagaatagaaggaaattacctcaacataataaataaagaccatatatgaagggttacatactccatggttaatatcatactcaatggttaaagttaatatcatactcaacagttaaagaccaaaagcttttcctctgagataggaacaaagcaaggatacccactgttaactgctttcattcaacatagtactgaaagtcctagccacagcaattaggaaataaatttatctagggaaaagttataaaaaaaaagttatccaaattggaaaagaagaagtaaaattatctgttcacagaagatataatctcatatgtagaaatccctagagattctacacaaaaaaactgctacatataaacaaagtttaaacaaaagttgcagaatacaaaatcaatacaaaatagttgtatttctatatactacaaatgaagaagccaataaggaaattgaggaaacaattccatttaaaatagcataaaaaagaataaagtacttataaagaaacttagtcaagaagacaaaagacttgtattaaaaaaactataaaacttgctgaaataaattaaagaagacactaacaaatggaaatgatgatggtggtggcccacctggagcagccactgcagaaatgccagctgcagcaggggaagcacgcttagggctgtgtgctccgcagagccagtggaagctgggaacaggagggagccatgacccattccgagttggccaggtgggagccccaccttcctgggcacagctgtagccgcccagctgcggctgcagacccaggcatccctgtgctcttggggcgagaaaccctcccatcccgcaggcttggaagtgcctgctcccactgcctggcctctcccagcacctggtactgtgattttggagcaaaactgaggtggagcctgggcactgttgcaacccagctggtgtgtgtgcacttagggtggtgctgacatgccagctccctgctgcctcagcccctctggactttgggcactgacgagcatgggagggaggccgagggggtactgaggatggctcaatgcaggcctgcaggtgccactccacatgaacagcctggggaccatggatgacatgtagatggcagcaggaggcagacaggctcctgggtggaaaggggcaggtccccactgaaaccccaccttcaagccaggaaggacctgaagcctgggggccaggatccattccgggtggagtctgtagctgggagtgagaacttatggtgctttttttaggccgacccatggccacccatggaccaatcagcatgcacttcccctcttctgagcccataaaaacccccggactcagctagactccggcagacatcaagaagacctgcctgcaggtaggagctacccattccatatctcctctccactgagggctacagagatgatgggatgacctgcctgcagatgggagctacccactctgaatctcatctccagtaagagctgtgttcatcaggaccacctgcctgcggaaaggagctacccactttgggtctcctgaaagctgtactgtcgctcaatgaagcacctcttcaccttgctcaccctccaattgtctgcgtatctcattcttcctggatgcaggacaagaacttgggacccgctgaatggtggaattgaaagagctgtaacacaaaaagggctaaaacatgccccccacactgcaggcaatgagaagaagagaagagctgtagcccttttaggagcccagacctagggactccctgagccagggctgtgacaccctctttggggcactgtggtttctggcatttccaagcttctgggcaccactgtattcccttcatccagacgcaggtgcccacaacaaaagccactttgcagtgcatctgatccagccacaggtttgcatgaagctgttgcctatgccagtgcctgtagctgcccactctgccacagcagctggtgtgcctggctgtgcacagtgactggaccccgtgctcactcatgcacccttcaccactccatgcttggctcgcccttggcagttgtggggtccaggctggtagcatgagccaagtgcagcctgccaggccaagtggccagaatgagcacagcaggtctgagcaaaacttgggcaaaggtgccaccagccacagaggcttccagctggaaaagtgacactccaaggatcctgtgacagaaacacaccttgtgttcatagattggaagtcttaatatttctaagatgtcaatactatccaatgcgatctatagatttaatgcaatccctataaaaatcccaatggcttttttttttcagaaatagagatattttttctaaaattcaaatgaaatctcaagggactctgaatatccaaaacaatcttgaaaaagaagactaaagttggaggtctcaaatttctcaatatcaacacctattacaaaattacaatagtcaaaagagtgcggcacaaagatagacatatagaccaatggaatagaatagaaagcccagaaataaagcttctcatatatgatcaaatgatattaaagagtgccaagaccattcagtggagaaagacagtcttttcaacaaaatgtgctgggaaaactggatagccatgtgcaaaaggatgaaattggaccttaccttatttcatatacaaaagttaactcaaaatgtatcaaagacctaaatacaagacacaaaactataaaatacttagaagaaaacataggagaaaattttcatgacattggatttggtaatgatttcttggctattgttactgaaacatcagggatttggtctaggccctactgcatgccacacagaaagccactgcacagaaaaccagtgattgagacaactagtattgccaaggaagaaggctttaatgaggatcagtctcaaatccgtctccctgaccaactgaaaccgagggtttatatagcagagaagaaatgaacagaactcagataaaacaaatataagtttcaagctttaagaccagaagggtcaatttctatgtttatccaaaaaactatctatggaactattgggtcagttttcgtataacaccaaaagcccaggcaacaaaaataaaaattgataaattagattacatcaaaatttaaaactcctgtgtatgaaacgatactatccacagagtgaaaagacaacccacagactgggagaaaatatttgcaaattagataagaagttaatatccagaatatattttaaaacttctacaactcaccaaataataaactcaattaaaaaatgagcaaatgaattgaatagacatttttccaaagaggatatgcaaatggacatcaagcccatggaaatctgctctgcatcaccaatcattaggaaaacaaaaatgaaaacctcaatgagccaccaccttacaccctattcaaatggctactataaaaacaaaacaacaggccgggcgcggtggctcacgcctgtaatcccagcaccttgggaggcggaggcaggcggatcacgaggtcaggagatcaagaccgtcctggctaacactgtgaaaccccatctctactaaaaatacaaaaaattagccaggcgtggtggcaggtgcctgtagtcccagctatcgggaggctgaggcaggagaatggcatgaacccaggaggccgagcttgcagtaagccaagctcgtgccactgcactccagcctgggcaacagagtgagactctgtctcaaaacaaaaaacaaaaaacaaacaacaaaaaaaaccaaacaaacaaaaaagaacaagtgctggagacattagaacacttgtggactattggtgggcatgtaaaatggtgcagccactgtggaaaacaaatgatgatcagacaacaaattaaaaatggaattactttataatccagtattgccacttttgagtatgtgcccaaaagaattgaaacagggtactgaagaggtatttgtatgcccatgttaatagcagcattatttgcaatagccaaaatgtgtaagcaatcagcattcattaatgaatgaatgaatgaactatgattacatatttcagctttaaaaaggaaggaaattctgacacatgtatagattttgaggagattatgccaagtgaaataagtcaactattaaaagaaaaacactgtatgaacacttagatgaggtacctaaagtagtcaaattcagggagacagaaagtagaatgttgattgccaggggctggggtgagaggggaatggagaggtttttgtttttttttaatggatatagagtttcggttttacaagatggagagtcctggagattagtagcacaacagtgtgaatgtaattagcactactgagctgtacatttaaaaattgttaaaatgctaaattttatgttatgtatatttgaccacaattttttaaagcctaatttctgaaacagctttgttcccacaggctttggaaaagatcctgtggtcctggggtgatgaggtatcaactttcagccaagtaataagggaaatgagcatgtgaggggaacaatgagcagtaaaaagggcaaatcgatttgaggtcctggtgggattgaagcatttatggaacaacctggaaagatatcagtggccatcagagacttggatacctgaaattttcatctggaacaggcacagtttagattatgaccatgggagtgttaaggaggatgggactattggaagcaagaagatgtaagtaatgaaactgagctgctacgattcatgaatactgaaatctccaatgtagacaggagctctctgctcctgggagagaaagaccacgagctacgtttctatcttcatctcttactactttcccaatgagaatgtggcaatagggagggagaaggatacctaccaccctatcctgaaccaatataagtggactgtgttagaaaatgcttgaaagggttacaggggaagaagtcatcaggagacaactaggtttcagttaagatgaagggaaaggaaacatttggagaagtacgaccctgaagttaggtgattagaaagaaaatactgattagaggccgggcgcggtggctcacacctgtaatctcagcactttgggaggccgaggcgtgcggatcacaaggtcaggagatcgagaccatcctggctaacacggtgaaaccccatctctactaaaaatacaaaaaaattagccgggtgtggtggcgggcgcctatagtcccagctactcgggaggctgaggcaggagaatggcgtgaatctgggaggcggagcttgcagtgagccgagatagcgccactgcactccagcctgggcgacagagcgagactccgtctcaaaaaaaaaaaaaaaaaaaaaaagaaagaaagaaagaaaatactgattagaaagaaaatacagtgtatttgctcactcctgtaatcccagcactttgggaggccaaggcagatggatcacgaggtcaggagatcgaaacacagtgaaaccccgtctctactaaaaatacaaaaaattagctgggcatggtgtcacgcacctacagtcccagcctggggaggctgaggcaggagaatctcttgaatccgggaggtggaggttgcagtgagccgagatcatgccactgcactccagcctgggtcacagagcaagactctgtctcaaaaaaaaaaaaaaaaaaaaaagactaaaatctagcctatgtagaaatagtgattcttgctgtactttatgcaaataatctgttttgcaaacaactcagtcctatcatgattgttttttaacaaaaatgaggactggagagagaaattatatttcaaaactcatcatacatttgtcattaaattctaaactcattagttgttttttttgtttatatttttagactacccctgcttgttcctgtgaaccaaccaatcaatcaaccaaccaagcaatctccagctgcagctcagaaagaacaaaagggatgggtaatgtaaaaatctggatcaatattctagttctgagcaattatcctgcaaatcctgccaggtgatggaaataaacaggatactcatcacgcagaggtttcctttctgggaaaggaagaccaagggagctaaccaaagccaagcaccatgcacccaaatcttagcaagcataactatagccaccagttatttgggcatgtcacaagacatgcttttctctcccttgttggaggaggattcaattccacaccttcacctcagcatttggcttctgataaggagtccatgtacccctaccaagacacattttttcccaaactcaattccaagcttcaggtcaaagccctaggaaagaaaactggatctaaggaatccagaggcagacaacaacagaggttaaaagacagtgcaggtaagcagggctaattcctgccaataaagccaagcctcccatttcatggataagggtcatgctagtatccatggcataaatgaggtctagggaactccaaggctactgatagtaggtgggatagagacataggtgagagcagctaattcctattatctaggccctccctgcttcatgggtgcaagctactttggcacctatggatggcacctgctaagttcactgggacttgatgattcaaggacagaagagggaaagaggacactcttccttctctccttcacataccccaggtattgctaggaagagaagggaaccagggatgcctgctcccgtctttctagatgggtagccattcatcttcaatctataccccttttgaatgcatcctgaacccctgggactccttttttaaaaaagcctccttggctgggcgcggtgcctggacgcctgtaatcccagcactttgggaggccaaggcgggcagatcacgaggtcaaaagatcaagaccatcctggccaacatagtgagaccccatctctattaaacatataaaaattagctgggtgtggtggcgtgtgcctgtagtcccaactactctggaagctgaggcgggagaatcgcttaaacctgggaggcttgcagtgaaagccttcttttttcctcctctttcctctcttcactgataggtaattttgtctctgtactcaggacactcctgtcagatgcatcctccaaactgggaaaagttaatttcccaaaccttagactggttggcttaggattgggctcaggggaagggaacccagaagcttgatatgctggcaaaagggtaaaagttttttttacagtcgggcttttggcctccctctccctgtgcaaactggtaaaaggccttgggatttttgatgtgtccttacccatcccttttttctcgttttgatacgtgttttctaataacctggtttgtctcttctcaccttcaggctatcaaactccaaatggtcatgcaactggagctttggaggatggccctttctgccgggtacccttagctagctagacctctgagggagctccaatgccattcccccagaacagcgccccctgtcagcaggaagcagttaagatcggtcttcgtccttatccttatccttattttaacagcagttagatgtacttctgcagaggggggaatgagacagccaggtgtaaaagggtccctggagaaactccaactgggctgcatactgggtgaatgaggtgaatccttgggaagttcctgccatttgcagggaggaagagtctggattctcctattccggggttggtaacctggatttaatttgtgagcccactggcaggaagtacactctctcgctttgctgaaagtccctgtttccccaccttttttccttttcacccaataaaccctgcccttctcgcccttcaaagtgtctgcaagcctaatttttcatggtcgtgtgacaaggaccctgtttttagctgaactaaggagaaagtcctacaacaaaaatggtccctcagccatatacttgagttgctcccttagggggcctcagttacttcccgatggtacattacatacctgggggtttattacctctgtaatcaggatcattctttaatgtggaaggaaatagcacacagaactcctgaaaaaattagatccttaacacaagacaaattatctttaaacatttttttcatgtgtgtatgtgtgttttcaaaaagtttttgtcggggaatggaggagtagatgacttttttttttggaagttgtagagtcgtaaagccagaaagagagaaaaactatggaaagagcagctccacttaggtgagtgtgtttttaaaattataatgtaaatggtaattattatggaagataaccagaatttgccaagcctacattgggggtagagatggagagagggtgctttcagccaaatagtatcctgctcattgccaaggagtcatgtaacactatggtaagttcagtgagctgaggatactctattctggttgtaggatagcatgcatatatgggcactttgcagtagaggtgtttgcagactttgggcttttcacttctgccatctgtgcttgggccaatggaattgagtgagatatacaatctacaaacaggctaccctggaacatttaccccaatctttgacacaaaggtagtgttttgttttgtattgtgttttgttttgttttactttctaatattctgaaatatcttagaatagttcttagttttcttttgtcccaggctttacaaggttggaaggggcctattcccatctttactctggaggtctcatcttctaatgctgggcattgggtagatgcttatgggtctgggcagcatccttgttctcaagcagtaagaggattccaaaggccattttaggtgttattcagcaggcactgacttgcaagatgccaagagcccacaagagaaagcaagatgacctgaagaaatggatgttccttcattctccacttgcctgaagacaaactgagatttaggtgaagctcacatctatttctgctaataacaatcccactgctaattatgggatgtggtagttatagtgataagagaggagctatattcagaggggtttagaaaaggttgcaatgtacagaggggtttttaatttgtattaatatttctcagtttacttcctccatttagatttaagatttactcattaattcaataaacatttattgagtgtctgctatgtaccaggcactgttctattggctggggataacagcaatgaacaccacaaacaaaacccttgctctcatggagtttgtactttagtggagggagagtgacaacaaatataataaaatactgtatgttgcatggtgataattttgagaagaaaaatacagcagggaaggggtatagaagaaggtgtttgacaggatttgcaattttagagagtgattgtaaatttagagaaggtccagggaagaaccttctgaaaagatgaaggtgaaggaagggagccctatggacatctgggtgcaaaggtattccaagcagagagaacacgaaaggggggcacatgcctggggtttttgaggaacagcatggagtccagtgtatatgcaataacatcaagaagacagtagtaggagctgatatcagagaaaaaaaaccacgagggcaagaccatagagcctaataagcaagccattgtaatgctttggtttcattcagtgtgagatggaaattcacttctttacttgacatatttacaggagtaaatcattgctgggttgagaataaactgaaaatttgaatcccctacttccaaaatgtgcaaagacatcataagattgataacgtttaataagcatctgtgactttataagccaggtgggtctctgctctttgtgtcttaatattttgcaaaagtaattgcagtttttaccattgacagtaatggcaaaaaccacaattacttttgcaccaatctaatatttaggacctcagacagtccacaacttagaagactcaggcctgaagacagtcttatcctctcacggttgactaagcaaatgtttgttgaatgaatgaaagaataatattgattgagaattaaaaaaaaaagagacaatagttaataattctgagtatcctgaaaaaactagtgcctatagcctaaattttctattaaaaaatgtaaagatttagcaaaatatttacctgtgtggtgacatttctttccttttgtcttttattatgttcctctgctttgatagctgcaatacacaaaatttttttataaaatttaaaagcattttctttttaaaatttcactaaatacaatttattgttaaaaaaacttctagaaaacttttagaactctaagaataattgttgacaataatttataatttagagttcctaataatgtgttaaaaataattccttcactgataatttgtaaagctagaacttgacaccagagacaatctatatactttaatcaagcattctgaaattgagttaataacatgaaagagttctataaatcatagagctaattacaatagtggaaaactttctgagctagaaatgtatttaattaaatgtatctatataaataagtgccatctattaatagaagctattaaaacatagaagaggaaatataacattttatatttttatagactcatccatatgtcagagagatactgaaaattaattgaatgatacaaacatctgagaaatgtagactgataattataccaggctttgaaatttgagaaaataactttcaatgaatttttaatgaaccaattttaatacttttttttataaagactatatatatatcatatagaatacatgcataatcattggcatatttatttttgcacagtgcttgaaatttcttcactttcttagagaaacaagtcggaaaacgtgagatgacaggataacacatcatgatgtttcaactttactacattactaagattgacaaattttcaattgctgtaaacaaacaaatctgatgcattgtaaaaatgatcatatgttttgggaagtaaaaaaaatgcaaatatgtgatacattcacatttcacaggctgaagaatttgaccacaaaccaatatgaaatagtcaaaattttgtatttccaaaaagtcaaaagcttttaagaacaggtcataaattttctaatgttatttctgacatagtatttattaattaattaatttatttctacttttttttttttggacacagagtctcactctgtcacccaagctggatgtagtggcacgatattggctccctataacctctgcctccgtgttcaagcagttctcatgcctcagcctcccaagtagctggggttacagacatgcaccactgcccccagctaatttttctattttcagtggaggtggtgtttttgccatgttagccaggctggtcttgaactcctgacctcaggtgatctgcctgcctcagcctcccaaagtgctgggattacaggcgtgagctgctgcgcccagcccattgtatttattaatttgatgttttattatttcacttaccagtgaactttagtacttggcagcagcctcacaattatacatctgttgtgtttactttgtaatctagaccttataggaactggtcccagattgattcatatttagtcctctgtcaaattagagaaataactggcaaattctaaataaaaattaggctgggtatggcagctcacacctgtaaacccaacactttggaaggacaaggtggccggctcccttgagcccaggagttttgagacgagcctgggcaacatagtgagaccctgtctctacaaaaaatgcaaaaattagccagctatggtggcatgcacctgaaatccaagctacttaggaggcttaggtgggaggatcattgagcccgggaaatcaaggctgcagtgagcagaaattgcgccactgtactcaagcctgggtgacagagcgagaccctgtcttaaataaataaatattcaaaaactgcctggtaagcaaggcattactaaggcataccaaattcttttaaagacgatacatatctgatactattatatacattaggattgttccttaggttcaagatatgaataagttttattaaatattattataaataaagctttatcccaagtttgtcaagtgattatattgggaccatgaatactcaacgtcagaggcaatgtagcctcatggtctaccatctggctttaagtcaaacaggcctatattctagtcttgattttgtaactatttcattaattggtatgataattaaatgagatcgtttatatatttagcacagtacttaatacacagtttttaataagtgttaggtatataaaattattattattatatggaacctacttctttaaaggatttaagatgccttgaggatattacatgtgagtgcaaaagtacttgcagtttttgcattgttggaatttgccgtttgatattggaatacgctacttaaataaatgtggttatgttacacatcattttaatgggcatttctcacctcatgttttttgcttattacttgctgtttattttatgtttattttagactatggaatgatgttagacaaaaagcaaacttgagcgattttcttatttgagttcaaaatgggtcgtaaagcagcaaagacaacctgccacatcaacaacacatttggcccaggaactgctaacgaacgcacagtgcagtggtggttcaagaagttctgcataggaggtctgggcgcggtggctcacgcctgtaatcccagcactttgggaggccgaggtggtcagatcacgaggtcaggagatcgagaccatcctggctaacacactgaaagcccatctctactaaaaatacaaaaaaaaaaaaagttagccgggtgtggtggcaggcgcctgtagtcccagctacttgggagctacccaggaggcagagcttgcagtgagctgagatcgacccactgcactccagcctgggcgacagagcgagactctgtctcaaaaaaaaaaaaaaaaagttttgcaaagaagacaagagccttgaagatgaggagcatagtgggcggccatcggaaattgacaacgaccagttgagagcagtcattaaagctgatcctgttaaaactacatgggaagttgccaaagaacttaacgtcgaccattctatggttgttcggcatttgaagcaaattggaaagatgaaaaagcttgataagtgggtgcctcatgagctgaacgaagatttgaaaaatcatcattttaatgtgtcctcttttcttaacaacgaacatttctcgattggattgtgatgggcaacgaaaaggggattttatatgacaaccagtgatgaccagctcagtggttggaccaggaagaagctccaaagcacttcccaaagccaaacttgcacccaaaaatggtcatggtcactgtttggtggtctgctgccggtctcatccactacagctttctgaatcccagtgaaaccatgacatctgagaagtatgctcagcaaattgaagagatgcaccgaaaactgcaacgcctgagccagcattggtcaacagaaagggcccaattcttctccaggacaaggcctgaccgctcgtcgtacaaccaaagcttcaaaagtcaaacgaattaggctttgaagttttgtctcatccgccatattcacctgacctgtcgccaaccgactaccacttcttcaaacatcttgacaactttttgcagggaaaatgcctctacaaccagcaagattcagaaaatgctttccaagagtttgtcgaatcctgaagcatggatttttacactatgggaataaacaaacttatttctccttggcaaaaatgtgttgattgcaatggttcttattttgattaacaaagatgtgtttgagcctagttataattattttaaattcacagcccaaaaccacaattacttttgcaccaacctaatgcattagtagtttaaaagggactatggcaagtaaagcataattagagaattcatgttactagcacttattaatgctttgcctgtaatgtgacatctctcaattatagtatctttcaaagaaaattccttagcctaattatatttgtgtattagaaatcagacattgtgactgatattatagtcacataaaatgtctagcagtttttaaactccattatcacaactagaaaaagtaaactagaaaaagcaatgtgatttggtagattcccattattatattccccaaagtacacagaataaaattagagttagtatgtacagaacgtacagacacagaagtacaaactgtcatgtgtatttgagtgagaggagaaaattatagatattaaatggagtgaagtttatattatacactggtccagaaaatcaaactgtcagtggtcaaagagtaacatgaaaattacagggctaaaagcagtcatcgaaagtaggataagtgtagataaaagaattagggaaatggaaggaagcataagcatataactgaaggaattaactattcagtagcttaaaacataacatgaagacaacagcaattgttcattatttccagcagaagatgtgcaagccaaaacacttttgaaacttacgacaagggtgtttattttctaaatttcaggcttttagattttttacctaaagaaaaagaagcttccattggctactagggaaaacattctgttacaaataatgtgtcccataatactttagagtagcttgtttcgtaccacttgagaaacattggtgattgctagagatctgcaccactgttttatcacttcccctacaggatgctgaaattcccacaaattcaagcactccctgtaaaaaaccacaatctaccgggtacaggaagaaaatattagatctacttgcctgaggctttaaaaaatctccttcattatctctattttagggatatgtttcataatgcacataatagatcagtagttcattatcatcatgaataaataaatatatataatagcgtacaccatcaaaaatgtctgatgtagagttagccttggaaggggactaaagtttcattcagctctagaattatagctctaactgtaatttattatatgctagattctttagatactttatcttcaatctccataacaacccaccaaaatagcaagcacagaatatctgtgttctcaccaagtgagaataagtcagttgtccaaggtcacagggcagagtgggattcaaatgcaggtctgactccagagctcttctttctacaccattgccacttcaaaccttaccaaaggattcacaataggttgattttaagtggcaaatttctgtaatgacatcaactccatttttttaaaaaacaaaaatctgatttatgcagaacattttatgggacatatcaatttacataacatgaaacacaccatcctatgcacactacagctttgatttactcctccccttccactgagatagaagaattttgaagtggtagggaagaagctagcactacagcctactgcctccaaaagaattgtccatgtggtttttggggcatggaggggaagcccatcggattcatagaagacttataaggtttttaaaagtgttgtgttgaacaaaagccactagcttgggttaaaagaaattgagacagttcaaaatgagaagaggcctctgggcctccatctttctaggaataggagacagcatgagaaagctactcagtcacaaacatgggccatttcttatgtaaaaggaaggacgactcagaaggcagagccaagcccagagggtattgccaagagccaaatagaacaatatattaaggaaccacttccggagggtagaactgggccctaattaataaacattgcctgtctctgtagtagaggaatcttccaacatgcacctggctagatttccaaattgccatggaccagtgactagtatatctctccttttgggacagcagtgtctaatatagttttgctgtctttccagtgtacattgggtatgtgaaggcataggggaataacttgtctttttagtttacaggtgcctgaattaaagaactatacctaaggaacttcatcgacatcttgacttcatacagaccatgagatgatggattccgagcttgatgatatgataaagtgagacctgggcaattttgggaggatgagattcatgaaagagacatgaatcgttgaggcctaagggtggactattgtagattgttacaacaatggcccccagggaatcacaactccttgtattcacatcgctttgcagtgtgactttgcccagtcctcccatcaggagatggagattattttttcccactccttatgtctgggctgccgttttgactttctttgaccaactgaaatgtggcagatgacacttcaaattccaaggctagtccttaggccttgcagcctcctttaccttcctggggcaatgctgtgagaccaccatgtcctgaagaagcaaggaataatagaccatgtggacagagaggcccagccatcccagctgtctctgctgaccaccagctgcatgaaactgcatgagagtgagtccagatgagatcagtgaaaagccacccaatcaacacacagaattatgagattatgaggagtaataaatcattgttgtttgaactcactaagttttgggttgttaatgcagcaattgacaactgaaatgattctgtgttttcagcctattaggacttcttgattcaaaaatctcaattctctgaagctaaggtagaccaataactaatgacaaaataaatcatacagaatatagtcctagcattgagaaaaggattagaagaataaaatatcgaccaggcacaatggctcatgcctgtaatcccagcactttgggagcctgaggcaggcagatcacaaggtcagaagctcaagacccacctggccaacatggtgaaatcccatctctgctaaaaaatatacaaaaattagctgggcatggtggcatgcacctataatcccagctacttgggaggctgaggcgggagaattgcttgaaccctggaggcagagttccagtgagccaagatcacgccactgcactccagcctaggcagcagagcaagactccatctcaaaaaaaaaaagaagaggaagaagaagaagaaaatataaaaaaaaactctctattatagttcttaccagatctaatttctcatgagagtttcaaaatgctttaactcctggcttcaccatttatttctctagtgtagactcacctcctttttgtccctggtgttgtctaactccattcagttcactcacctacttaacttccacggactattgttctgttcatcaacccttgctagccaatatcttgacttctcattctctcttatattctttctcatttccttgaaatatttggcagtttcccaatctaaacaatctggagcagcaaaaaaaaaaaaaaaaaaaaaaaaaaaaatcagagtaacaataggccaggtgcggtggctcacgcctggaatcccagcactttgggaggccgaggtgggcagatcacctgaggtcaggagttcgagaccagcctggccaacatggtgaaacccgtctctactaaaaatacaaaaattaggcaggcgtagtggcatatgcttgtagtcccagctattcggggggctgaggcaggagaattgcttggacccgggaggtagaggctgcagtgagctgagattgaaccgctgtactccagcctgggaaacagagtgagactccatatcaaaaataaaaaataaaaataaaaatgagaataacaattaaaaagcaaaaaaaccattttcccctaacttcacccttgttaccagaggcctgaccctaatatttgcacaccctagagtaggaatacaaacggcagtccaccttctatatgcctaaatatatatatttttttccttgagatggacttttgctctgtcacccaggctggagtgcaaaggcaccatctcagctctctacaacctctgcctcctgggtccaagcgattctcctgcttcagcctcccgagtagttgggattacaggcacgtgccaccactcccagctaatttttttttgtatttttcttacagatgggggttcaccatgttggccaggctggtcttgaactcctgacctcatgatccacccgcctcggcctcccaaagtgttggggttacaggcatgagccactgcacccggcctgtatgtctaaatatttaaatgtcatcaatcaagctaacagtcaaagaaaatatgttctatccccctattttgtcaaatatatctttattaaaaacctgggaggccaagtttgaatttggagtctttgcaatccttgcttttgtgtaagaaattgtcagcataggaagagccagcccaaggaccccaccccaccccacccccaaatgcaacctgccctttttcgttgagcacattgtaaatgtgtggtgtgctctgctatctgctatctcttcattttttttttttttttttttctgagacagagtttcgctcttgttgcccaggctggagtgcaatggcgcaatctcagctcaccgcaacctccgcctccctggttcaagcgattctcctgcctcagcctccggagtagctgggattacaggcatgcaccaccacccctggctaattttgtatttttagtagagacggggtttctccatgttggccaggctggtctcaagctcccgagacctcaggtgatccatgcgcctcggctttccaaagtgctggcggccatctctgcttcttaatagtctttttttttcctactttacattcttgaaatctagcttttaaccttttcacatagataacttctttctcaaaggccagtaatgacctctttttcttgtctcattcaatgacatcttcccccagacatatttgcttagctttacagtctttctttttagacgctgttgtacaccagcttctgtgacgttatactatctccgatatccttcttccttctaaccccctatttgagagtttctcttttgttttgagtctcctaatgattttgtatttctcagtgctcagtcctcacctcttctctctggcatgatgtgagggttgagctgggccagtggggagtttggagtggacagctgtgggtgcaggaggtcaggaagtaggaagggatactgattcccacataggctgccacttaagaagtaaagccctgggaatcacactgtgatgaatggaaagcagaaaaacacaggtaacaggagaatccagagaagacactcattcaggctgacagaggtgagacaaatagtaagaggtcaacctggcaacgaggatgattctaaaacctgggactaagtttcgagagcaggtcaggctgggaataaatgactagaagtgtgcagacagtaagtaccagaaatggggagaaaactggtgatacatagaagaagagagatgatttgcactacaagggcccagagaaaattctcccaatgggatttttgttgggtgagtacttagttttctgaggaaagcacagcgtaaatcagacccagtcatttcatgcctgcattcatacaatagcctcctaatatatttaattataattgttctcattttaatctaatttccgtctacccttagaataattttccctaagtactgttttcatcaagacacccatctccttaaaaacctacaagtctttggtcgggcacagtggctcacgcctgtaaccccagcactttgggaagcagaggcgggcagatcacgaggtcaagagatcaagaccatcctggccaacatggtgaaaccccatctctactaaaaacacaaaaattagctgggtgtggtggcatgcgcctgtagtcccagctactcgggaggctgaggcaggagaatcgcttgaacctgggaggcggaggttacagtgagccgaagttgcaccaccactgcactccagcttgggtgacaagagcaagattctgtctcaaaaaaaaaaaaaaaaaatcactgatcacagaccaccgtaagagatacaataataaagaaaacttttggaatattatgagaattaccacatgtgacagagacacgaaatgtgcatatgctgttgggaaaatggtgccgatagacttgctcaacacagggttgccacaaaccttcaaattataaaaaatgcagcatctgtgaagtgctataaagtgaagggcaagaaaacaaggtacgcatgtatgactctaggttctttattagtttaatttgtgagatgcttatttttggacatcatcaattggtgtttgttttcttcttcttcttccttcttgcctcttcttcttcttcttcctcttctttcttctttcttattttttgaggcggagtttcgctctgtcgcccaggctggagtgcaacggcacaatctcagctcactgcaacctctgcctcctaggttcaagcgattctcctgcctcagcctcttgagtagcaggaattacaggcgcccattaccacacccagctaatttttctattttttagtagagacgaggtttcactgtgtgggccaggttggttacaaactcctgacctcaggcaatccacccaccccggcctcccaaagtgctgggattacaggtgtgagccactgcgcctggccaccaaatgatgcttagaaatagtcatttcatattttcttatttaaccatgtgaagaagttggataaattactaagttattttacctccctgagcctcagttttctataaaatgggaatagaaatactgttcctaccttttggagtaagtgtgaagacagaatagaatcaaagtttaaattgtttggtgttttattaaatacatggcactttaataacaaatgtaagttcctctctctttctctgttaccagagacctgtcttttttttttttttttttttgagatggaatcttgctctgtcacccaggctggagtgcagtggcacaatctcagctcgctgcaatctctgcctcctgggttcaagcgattcttctacctcagcctcctgagtagctggaactataggcacgggctaccatgcccagctaatttttgtatttttagtagagatgggggtttcaccatattgaccaggctggtcttgaactcctgacctcgtgatccacccgcctcggcctcccaaagtgctgggattacaggagccagccactgtgcccagccaaaacctatctttttaaaggaagtagcattagcatctgtgagaaaagtacttcccttactgaaataaagtgaagaagctacactttgtaagccatggaagaagcagctcctgctgaactttactttctctctggctttttcttgctctgatcactgctcctacccccttttccttgaaacctcttttcttggttccccttaccacatgtaaaactgactggcattttcaaaacagatttagtaattcaagaaagaagaaaaaatatttaaaaggcacagatacagtcctatatacactgacagatctctggttataatatctcaactgccttctgcctggtcccagctcatttcttttcctggtagaatttcacaagaacctttccctacttgcaaggggagtgccatcttactttcaaccatatgggggcaactttccttaacaactggttctgtctggcattaagggcaggaatacaaattctaactgccactcacctaagctcttcccattctgaaggacacagcttttctcttctccagagctgtgaaatgaagagggtgacgggtattattgccccccaacctctatgctctgagaacaccttggttccctagagagccatctcagtcatataataattgtaacatccatacagcaagaattgcatatatatgagggatagaagggagctattccattcctctcttaacagaaatgatttacaatcattatttctacataattagaccaaacctggatatttcaaggtctctaaatacaaatacattttgatgtatttttatatatttggtaataggctaatggcttagttatataaattaaaatatagtagatgttctgaaagtctgtaatttagtgtcagtgtcttgaaaagatatttcgtagtcttttattctctcttcctcatcatttccttcttcaagtgcaaagatagcaaaatttccataaaaactaaagttactggggactaggtttttatttattcttttctggaatagttccgttacttattttaatttttatgaagtttaactgagtagagaaggccaaataactcagctttgctgagaatattccttccagaagcctaattacctcctgtagatacaagtaaagagcttaacagcaaccttgaaggatagttgaataattgatgcaatgtgcctggcacagtgcctggcacagtgcctagcgcatagcaagtgcctaataaatgttattcttatgattaattcttcattaggtgagaaataattttggagaaatgcaaattataaatgagagtatgcggtggaacatattaactgatgacaatattaactgatggtttttcttggtacttctctgtacctgtggccttttcccaatttagtcagtgagttgctcattgcttcagaaaaaaataatgatgtggtagaaagaaacgaattttcttggctgttggaggaaaagaaaggacttacaatctggacaacagaataaatgtagaataactgggatataacatcaaagtaactgcaaggctttctgtgctctcttcccaaaatgagaaaacattccctggactaggagtagggagagagctagagaggtggtaaagagaaattaacactacaatagctcgacattaaatgtattagcttgacattaaacagaaattacattccaatgttgaaaaaactgttgtatttcttgcttgctcaaatgtatgaactaaaatgtataatggatatattgacttagttaattctattcatacaaagtatgaaggctttgttaatggtgattttaagatgtgattatgtcctctagaaatagggcactaaagcttttaagcttagagacacacagtgactttagttgaaaggctgaaattttgcaatagatagaaagtttccacttagggttgtgatgaagagtggaaatactcaaactacttgttttgttgtcactagttgaagtggctgaaatatgattaaataggcagcaaggtggcctgaatatattcctgtcatttctaagtcccaatgtccccacaaactaaatcattatttctcatgtgccccctcccaagtcaccttcctttctccaatattctgcccctgtcaaggggatcatcactttctcaagctccaaatcttccatcatgttttactcactccatgccaacatccccatgaacaggtaaaacattgttgtgttttgtttttctttgaattgcacagtcgtgggtggggagtgggaagagttattctcagaaataaatgagatcatggatgtgaaagtgcttgacatttgctaggcactcagtaaagtttcttttaatttcttctatctgacaatttaagcctttgaataatccaatcttatttttcttagccaatttatttcccactacaccctgctcttattgaagtggtagtatcctcctaccccatatgtacattctactcattctcacacccatgtattttacttatttgtgcacttctaatttggaatgctttcctattcttttccgaatatccaattgttattcatccttccaggacatgtctttcctgtttcaacattagagccagatgcctaccatagttcctgtcctataacagattcttaatacatatctgttaagtgactaaataaatttgccttcctacctgtaggtctcactggatactactgccttcaatgacccatcatccgttcttggtacatcttcaggaagtggtactcccttgtcacttatgttagcacccactcatatattgaattttattctacggattgtaagatctctgaagaaagtgctccatcctcttttttttttttttttaaagtttgcctctagcaccctgcacagtttcttaattaaaaatgttgtttgattaaatacttttattataacacagcatgtcattctgctgctggatctaaaatttaaccaaactgccttttaagttacaatagaaaacttagagtcaaagaatcgcaagtttggaattgtcttctgacataccgtgaaataaaatccagaatctcaaggttggaagacagttgtctctgcaacagtggttgacatttaattactaaatatggatagacatttatgatgtttttaattattttgccatgacaaacaatactgtaagggataaccttgaacatgtttcctataaaacatgtataagggtttgttagggtggacaagaagaagtaaatttgctcatttgagaggtagtatgctcattttaaatattaatagataatgccaaattggcattccaaaaagctaccattctacttccacacttagtatacgtatgttatatataatactgccatggccggatgcagtggctcacgcctctaatcctagcactttgggaggctgaggtgggcagatcacctgaggtcaggagttggagaccagcctggccaacatggtgaaacattgtctctactaaaaatacaaaattagccaagcgtggtggcaggtgcctgtaatcccagctactcgggaggctgagacaagagaactacttgaacctggcgggtggagtttgcagtaggccaaggttgtgccattgcactccagcctgggtaacaagagtaaaactccgtctcaaaaagaaaaatactgtcacacatattaattaatagaaattaatattcctatatatattactatatatattatatatactatatctattactatataggaatattaattttttctcaccataactggcacgtttcaatttttttcaatgtattgtgataatactggtgtctcactgttaattttcatttgcatgattactggtacagttaaccatcttttcacatttgggagcatttatatttcctctctaaggaactgactgttaggtcatttgcccatttttctatcaggctcttttttaaaaaaaatctttaggaattccttatatgttctagatgttatttgatatggtgtgtatgttgtaaatatattcttcagtctgttttcagccttttaactgtttattgtatccttttcaccatagaggtcttaaatcctgaagcagtgaaaattatccattccttcctcacttataacctttttgtttgtgttttgttcaagaaggttttcttaccaagcatttgaatctatattttaatgtatttccttaaactatttttatagttttgtttttacaatgtacttttgttttgttttgttttgttttgttgagatggggtctcactctgtcatccaggctgaagtgcagtggcacagtctcagctcactgcaaccttcacctcccaggctcaagcaatcctcccacctcagcctcctgagtagctgggaccacaggcatgtgccaccatagctagctaattttttttttttttgtatttttagtagagatgaggtttcaccatgttgcccaggctggtcttgaactcctgagcgcaggtgatccacccacctcagcctcccaaagtgttgggattacaggcgtgagccaccgtgcctggctacaatttacatttttaatccatctggatcatttttgtgattcgtatgaagtgggatctaccattttgtcctaaataaatggacaatttgtcactagcaatcattacaatccatctctttcctattacattttaaaaccttctttcaggtactaaattcttattcatacactggtccattttttaactctctgttctgttttcctgatctactcctctattcttctggcaataccctaattactgtatatctaattactgtatatttataattgcatattttactatctggttgagcaggaacttctctgtgtgtgtgaggacacacacacacacgccctctatgttcctctttgtgaaacttatcttgggaattccggcgtaatttcttttctagataaattttagaataagcttgtcagattcatttagaaatctgttgatattttgactggaattgttaatttacaattgattggaaatgttaatttacaaaaacttggcatatttgcaacacagattcattcagatgtacagctttaatttattcacgtttctttgtttaatgttctccagatacactttaatttttattccttgggtattttactccagcttcattaaatttattcctagctattttataacatctgttgctactgtgaaaaggatttttaaaaagaaatctctgtgattgttgtatttctaaaaaataaaataagcctttatttagatttatcataagtcttaaaggttacttggcttaccactgacttccagtcttctcttggattcatttttcattttgctggagcatgtcttctagctattatttcagctagggtttgtaggtgataaattttctgaatccattcatgtatgaaaatgtctcatgtttgaaaatgtcattacacttgtttgattgtcagattatagaattctaagttcaaaatcattttcacctcagtattttagaaaatatttctctagtgtcttcttatactcagtgtggctaaagaatctgaagtcaagagggtgctttttgtttgtaaataacatgtttttctctttagaagcttttaggattttctcattatccataaagtactcacattttaccactattttctatgagcgggtcttttcccagtgttcttgcttggcacaaagtgggccttaatgtgaaaatttgagtcttttttcatatctagggaattttatttgatttatttttcctctgagttttattttctctttctggaaatcctattgtatggatattgtaacgtttgtatgtatcctccaagtgccttaacctttatttcatatgtatcacctccctgtctgtttgtattatgatgtgagggaatttctcagtttgatcttgagcacccaggttgctcttcagctatgacaattttgctattcagccttaaggttttcacttttgctatcagatatttcatttctaaaatatcttttttctttcattaaaacctgttcttgtttcatggattaagtaacctctctaaatacatattatggtattttatgtttaaaagtcttcaaatgtttgctttttaaaaaatatggaatgcttcacaaatttgtgagtcacccttgtgcaagggccatgccaatattctctgaattgttcaaactgtagaatatgtaagcactgctgagtcctaatgtcctcgtgttaggcttggattttccgttagcctgtctgtgaatgctataacgaattatctcagctttctaccagtgactttgtgggtattgcagagtgtgctatcagaatgtaacaagagctagtcttctaggaatagagactccatgaatatcactagccatttgcagtagcatcctatgtctctggcacaaatgccgaccacaaatgctcccacctaatggcgatttgtctctttttgcacttatttttgactatctactgcacactttattagagtggattctttgaggcctatgatgaagttgtctttccatggagaaaacatgaatttacttttgccaggttcctgatgtttaacctaggtgcctagatctaaccttagatctagttctagggttggggtgcctgggaatccctaagcaatgtaaacccaagctgtgagggctggcacatgaccacacaatttctcagagatatatatttttctttttctttttctctttgctctgctaaaagttaagtcctgctgatccctggacttgggaaggggtagtgtgcccttattttaagagtatagcattttccgttgaaaaggtctcttattatacttctcaccttggacgggtctagagtattggattctatcttctttgtgtggccattaaaactaatgtctacacttgtctagcacaggggcaaaagctgctttgatgttcaggtgcagggctggggccaggatggggcaagtcctggctctgctcaggggcacttgtgcttacttctctagattctagattttccctagattttttgtctggtacttcactgtcttctcaactctctgatgcatttaagaagtttgtattttacatgtatcattttatttcagtgggagggttggtccaacaacctagtaatctagcctttcctaagtcttgccctttcctctgtatatggtggtagtggcggttgagaggggagtaggggtcagaactgctaggctgctcctactgctttttattttttttccttttctctctctctctctttttttttttttttttttttgagacagagtcttactctgtcccccaggctggagtgcagtggcatgatcctggcttactgcaacctccgcctcctgtgttcaagagattctcgtgcctcagcctcccaagtagctgatattacaggtacccaccaccatgcctgactaatttttgtatttttagtagagacggggtctcaccatgttggccaggctcccgacctcaggtgatctatccgcctcagcctcctgaagtgctgggattaccggcatgagccactgcaccagggctccttcctttttttccctgaacctacttgtacatctttcctagaagtattctcttttgcacattttgggcaaaagttttctctttgaattcaattccaccgattattttgtctcttgggaattcctgatgatttcaaagacactcctgcttgtttccagagttaatgttttcttgtttttttctccctaaatctctcaatcatggaagctgcagggtgtaaatcattttatccaatctcagaatattctcttcaatcccagcattataatcttggttccaagtctgtggggacaggcttaaagaagtcataagaaccaggttttttttactacattttatgggctgataaatgatataaataagactagatgactatagtaaataaatggaagaatccagtaaaattagaaaatctataaaaaactgattgtcactattagagtttatataataatcatactgccaaaacaactggttgaaaagcaaatagctcaatcaatcacctggctgtttgttctatatgaaagcaaacatatgtatattacatttaaaaatatttggatgattgattgaatttttaatttttcatctggctgtttaatagtatgcacaaacagcctgaggcaagtaaatatgattgtgaggaaaatacgcagcacagtcctttggagaattcaaacttaaaataacagaggtaatacagagtaaacgcctttgattcccaccacagaattcaggtcctactaaactctgttcttcagaattttaaatatctataaatttagaataataaaaacatttgaatgacctactccacaggttttgggaatgtattttacaaagtatagcattacatgtatgttaactactatttaattttataagtgcttctgagcatctactaaatgccaagttctacaatgagctaaaggagatctaaaaggcaagtacaacacaatctctgtaatcacgtagttagcaatctgctaagggagttaaaaactaacttagttatgagactttgatgcataggacaataaaggcacaatgtgctattaggaaggggttgggaaacttttgttttgttttgttttttgtttatagagacagggtcttactatgttgtccgggctagtcttgaactcctgagctcaagagatcctcttgcttcaccctcccaaagtcccaaagtgctgggattacaagcatgagccaccaaggttttttgtttgtttgtttgtttgtttgttttgagacagagtctcgctctgttgccaggctggaatgcagtggtgccatctctgctcactgcaacctttgcctcccaggttcaagcgattctcctgcctcagcctcccgaatagctgggattacaggtgcatgccaccacacccagctaattttggtatttttagtagagacagggtttctccatgttggccaggctggtctcgatctcctgacctcgtgatccaccggcctcggcctcccaaagtgctgggattacagggataagccacagcacccggactgtttttttttgttgttgttgttgtttgtctgtttttttaaagaggaagtagaacttaagatagaccttaaaagatgaacaacatactatactttagatttatggcggtgatggggaagaagatcggatgacagcccactcctgttgacagatcgtctgaagaacagattgagaaagacatggaggtgggagagttagctaggtatactgagtagctaatagtttgaattggttgaaataaaatacgtgtgtagctaagacaaaatagaaaggaagctaggatctaatcacataggattttgactactggacaagacattagacctttattctatataaagtggatgtctcagcaggagaacataatgaggatagatttggagttgaggaatattatttctggcagtaatgtatgtggataagagaaaagcaagttagaagtgcattagtgtagttaaaagatactaaaatgagattttaaattgagacagtgaaaatgcatagatgggaaaacccctgaggacgtagaattgacaagatttggtaaaagaataagggaatgaataaatataaacgattaggagattctggttctagatttagctttgcaagatgacccgggagaagcaatttcaccatggtgggcctcagtcttatctgtaaaaacactgaattaaatgatacttaggggaattagaactgtataatcatgcaatttggagtacttgagaacaaggtgagcagggaaggatagttgatgccattaacaagagaaaaaacacaggaggaagtaaccttgaaaacaaatgttgatttaaggaatctgcatacattgttcatgatcatcatgtagctggatatgctggtctagagattagaaggagggtatgagatatagacacacatgtaaacaaagttgtggggcttgggtgagagcacaagaagcatagaatatgaagagcaagaaagccaagcaccgaaccttgggcacagcatttaaaaggtgaattgagaaagacaagcccatgaaagagcctgagatggctatacagaggaagagggaaaaagaagatggtgagtaatgtcacatggtgcacagaagttagcagaaagaacagcaagaggccgctggattggtaatcaatgagctgttggcgttctttgagaaagcagtttcaattgatggggggatagatcttgggatccattaggagcaggtagaaggctaacactggcaaacagaattcttgggatatacataaaatgggagagacttatgaacccttatgtgcaaaaaaaagtggagtggaattgggaagagtgattcctgtcagacaaaaagaactcaatgaagctgagataaagctgatgcatgagtatttatgtgttctgcaagggggtctgttcccctagctctccccaggccgaagactgtcctctctccaataagtgctaccctactgaatagatccaaaaagtagtagtaattgtttgatacagaaaccttttagatctgtatactaaaaattataaaaatttgatgaaaaaaattcaaggaggcataaataaataaaaagatatattcatggattggaaaaattaatattgtaaaaatgtccacattactcaaagcaatctacagattcaatacaatctctatcaatatcccaacatcatttttcacaaaaatagaaaaaaaacagccattaattttgtgtggaactaccaaagaccccaaatagccaaaacaatcttgagcaaaaagaacaaagctagagacatcacactacttgacttcaaaatatattacaaatctataatactcaaaacagcatgatacgggactaaaaacagacacactgaccaacggaacaggatagagagctcagaagtaaacttacgtatttacagtcaattgattttcaacaaaggtgccaagaacacatgatgaggaaaggacactgtcttcaacaaatggtgttgggaaaaatgtatatccactgcagaagaatgaaattggacccttatcacacaaggcatacaaaaatcaactcaaaatgtattaaaaacctaaacacaatagaatagctctattatcaaaaagacaaaaattaacaaatgctggcaaggatgtggagaaaagggaacatttaaacactgttagtggaaagtaaattggtacagccattatggaaagcagtatagaggtttctcaaaaaactaaaaatagaattaccatatgatccatcaatcctactactatttatccaaagaaaaggaaatcagtatactgaagagacacctgtgcctccatatctattgcagcactattcacaataaccaagatatgaagtcaacttaaatattcatcaacagataaacgaaaatataaaaatataaaataagtatacaaataaaaaataaaataaaaatatacacaatgaaatattattcagccatgaaaaagaatgaaatcaccaggtgcggtggctcacgcctgtaatcccaacactttgggagaggccaaggcgagtggaacacttgaggtccggagtttgagaccagcctgcccaacatggcaaaaccccgcctctactaagaatacaaaaattagccaggcatgatcgtgcacgcctgtaatttccggtcacttgggaggctgaggcacaagaatcgcttgaaaccagaaggtggaggttgcaatgagctgcgatcatgcaactgcactctagactgggcaacagagtgagactcgtctcaaaaagaaaaaagagaaaagaaaaaaagaatgtaatcgtcatttttgcaacatggatgagcccagaggacataatgttaagtgaaatgtcaggcacagaaagacaaacgctgcattttctcactcatatgtggaagctgaaagaattgagctcatataagtgacagagtagaattgtggttattagataataggaaggatgggaagagaggaggatagggagaagttggttaattgatacaaaaatacagctagataagagaaataaattctagtgttctatggtactataggataaatatggttaacaacttattgcatatttcggaaaagctagaagagaagattttgaatgtttacaacacaaagaaataataaatgaggtgctatgctaataactgatttgatcattacacattatatatatgtactgaagtatcactctgcatcgttgatgaaattgatgcatgattatgtatcaacgaaaaacaaaagaaaaaatattcagaagacatacattcaaggctgacaaaaatataactttattttcctgaaactggcacttaatctctgtgttgggctacatattggcacaatggaagaaaatttaatctagttacttacaaataaacccagtcactttgtcatttcaaaaaaataaaaaagatttaagcataagaccagaaactctaaaagtactaaaagaaaatatagaggaaaagcttcatagtattagcctgggtagtgatttcttaaatataaccccaaaaagcataagcaacaaaatgaaaacagacaaacagaatttacatcaaactaaaaatctgtacagcaaagaaaacaattaataaattgaacagacaacccatgaattgggagaaaatatttgcaaaccatacatttgataaaggactagtatctaaaatatataagaaactcaactaaataggaagaaaacaaacaacttgattaaaaaatgggcaaaaaccctgaatagacatttcttgaaagaagacatacaaatggccaacagatatatgagaaaatgttcaatatcactaatcatcaggaaaatgcaaattaaaatcacaacgagatattgcctcacacttgttagaaaaaagatgaaagatgagaagtgttggtgaggatgtggagaaaagggaaatcttttttgagacagagtcttgctttgttgcccaggctggagtgcagtggcgtgatctcagcccactgcaacctctgcctcctgggttcaagctattctcctgcctcaggctcccaagtagctgggattacaggcatgtgcctggctaatttttttatttttagtagagatagggtttcaccatgttggccaggctggtctcaaactcctcacctcaggtgatccacctgcctcggcctcccagagtgctgggattacaggtgtgagacaccacacctggccagagaaaagggaaatcttatacactgtgagtgggaatataaattggtacagccattatgtcaaacaacatagatagagattcttcaaagaaaagaattggcatatgatccagcaatcccccctctaggtatatatccaaaggactcgaaatcagtatgtcgaaaagatgtctgcgctcccatattcattacagcatgatttacaatagtcaggatatggaaacaacctaagtgtccatcaatggatgaatggatgaagaaaatgttgtatatatatacaatgaaatattattcagccttagaaaaaaggaaatcatgctatttgcaacaacatggatgagcctggagtacattatactaaatgaaataagccaggaagtgagaaagaaatacttcctgatctcacttatatgtggaatctaaagagttgaaactcataaaaatagagagtagaggctgggcccggtggcttacgcctgtaatcccagcactttgagaggccaaggcgggtggatcacctgaggtcagaagtttgagagcagccttgccaacatggtgaaaccccgtctctactaaaaatacaaaattagcggggcatggtggtgtgcacctatagtcccagctacttgggaggctgagacaggagaatcacttgaactcgggaggtggaggttgcagtgagccgagatcgtgccattgcactccagcctgggcaacgagagcaaaactccacaacccccctaaaaaaaagaaagaaagaaatagagaatagaatggtggttatcagaggctggggaggggggtgtggggaatggggagaggttggtcaaagagtacagtttcaattagatggtaacaataagttttagatgttgcacagcatggtgactatagttaataacgtattctgtatttcaaaattactaaaatagtagatttcaaatgttctcaccacaaaaaatggtacttatatgaagggatggatatgttaattagtctgacttaatcattgcccaacatatacatatatcaaaacatcacattgtgccccataactatgcaattaatatttgtcagtgaaaaaaatacaaaatcagaaaccattcagacaagtctaagatatgaagatgtgaaaaagccttataactttcaggaaactcacaaaagagaaatgtgcttttttactgatccctcacataacacagttatcaaacttctctcttgcagtcatcagtcctgtcataacacctggtctctcctgcttcttttcagggagagatgctccagatacttgcagtttgtcttttccctggttacaggtacaacatgaaagaatttaatgaaagcaaaggtaatttagaaattctcaattccataggttattcaaaatagcactggtagaagcaagaacatttctgaagcagcaggatatttcctgcttctactgcttaggctgcagctcctctgcaacatgtccagggcttggtctttatgtggcctccttctggaccacacagggacctagacatgactgtgaggcaactgctttctggactctggttactgtgagattgatgagctatgtgcccttttcaactgggatagagagctgctggataggtgagtgtctgagagagttgctattaactttttgttgttttgctttgcctttctaatcacagaagtgtatgataggagttactactagaaagaaatagatggggccagccatggtggctcatgcctgtaatcccagcattttgggaggctgacgcaggaggatcgtttgagctcaggagttcaagaccagactgagcaacacagcgagatcctctctctccaaaaaatacaaaaattagcctggcatggtggtgcatgcctgaggtcccagctagttggaaggtggaggtgtgaggaatgcttgagcctgggaagtcgagcctatagtgagttgtgatcgtgccactgcactccagcccaggagacagaatgagactctgccaaaaaaaaaaaaaaaaaaaagtatattccgagacagtagcaagttctatcattgtaaacaaaaaattaaaaaaaagaaaaaagaaaaaattgtttctaagagagatgtaaataaataaataagaaagagaagaaatagatgggagacaggaccctggatgatctagagccagaactcctggcaatgccttttctctgcctcagtgatatattttacactaccttaaagcagcagcaggccaggcacggtggctcacaccttaatcccagcactttgggaggccaaggcgggtggattacaaggtcaggagactgagaccatcctggccaacatagtgaaaccccgtctctactaaaaatacaaaaattagctgggcgtggtggtgagcacctgtagtcccagctactcgggaggctgaggcagaagaattgcttgaacccaggaggcggaggttgcagtgagctgagttcacgccactgcactccagtctgggcaacagagcaagactccatctcaaaaaaaaaaaaaaaaaaaaaaaaagcagcagccaagttgatagagtgaagagagaaaaaaacacatgattagtttaacatgattagttttccttccatttttctaagccatatactttgggatggactgttcattccttccatcattttccatcactatttcactctgaggatttaccaaaagggaaataactcagtaactttttaagaatttccctaggcgaacgtagagtcagggacaattgaatagttatgtccccctcaataattttatataggcaaaatcaaaatacaatgagtatcaagtgaaaaaatgaataaaaaggcaacatgcaagcttgcaaggtgtatctgaatgaaaaagggcagacctgtctgttttgccttgagaaatagggtagaggggcagagagagggaaaaaaagtgaggttaagggctaattttacctatgaatcttaggtcttttagcactagcttttgttttttgttttgtttttgtttttgtttttttttgagacagagtttcgctcttgttgcccaggctggagtgcaatggcacgatctcaactcactgcaaccctctgcctcccaagttcaagcgattctcccgcctcagcctctggagtagctgggattacaggcatgcaccaccacgcccagctaattttgtatttttagtagagacggggtttctccatgttggtcaggctggtctcaaactcccgacctcacgtgatctgcccgcctggacctcccaaagtgctgggattgtaggtatgaaccactgtggcccgccagcactagcttttaaaaaataactgttttctcttccactaactccttccctggttctctatacacccacaattaatgaacgatctattgatagctagagtctgatcctgaacactgccacaatccaggaagaactctataatcattatgtctctactttctctcttcatgttcacttttaccaattgaaatcagattccttttttttttttttgagttgaagtctctgtcacccaggcttgagtgcagtggcgtgatctaagctcactgcaacctctgcctcctgggttcatgtgattctcctgcctcagcctcctgagtagctgagattacaggcacatgccaccacgcctggctaatttttgtatatttagtagacatggggtttcaccatgttggccaggcttgtctcgaactcctgacctcaggtgatctgcccgccttggcctcccaaagtgctgggatttcaggtgtgagccaccgcactcagccttgaaatcaggtttctgttcatgcttctccactgaaactgtcctggaaacataaaaattctcaagctattgaatttcatggtcacttgctgactcattccccattctctgtggcatttggcattgttggcaatttctatgttcttagtactctctcaccttggacttccgtgataatctctttagccttgatatccatcaactcttctcagttcccactgctgttgctatagtttaagtcttcattgtttcttgtttggaccattcaataatgtcctactagttacactgtcaccagagttatacagtgacatccaatcctctactgccaaagtctctctctttctttctctctctcttcctccctcccttcccctcccctcccatcaccctcctctcctcttctttccttttttctttcttttttgctaaagggcattaaatatttgctttttttgctattaaatattttttgcttttaaattttttttgcttttttcatttttaattaacatataataattgtacatatacggagcacagtgtgatattttgatacatatatacaatgtgtagtgaacaaatcagggtaattagcatgtttctcacttcaaaagtttatcacttctttgtgtttggaacattcaaaatctgctcttctagctatttgaaaatatacaataaattgttgttaaatatagtcaccctatagtgctatagaaccctagaacttattcctcctatttagctatactgttgtatcagtttaaccaaccgttggatatcccctctcccccaaccctcacatctagtagctactattctactctcaaagtcatttttctaaggcataattctattcatgttcttcaaggagtaaacctgaaatgactacccattgctcccaggataaagcccaaacttcatagcctgtcatacaaagtccctgcctaccactccagcctcataagttgcttcttacatactacaccacagcaaactgatacacttatgtatagacaatgctctttcattcctctgtgtctttggtccttttttctggcctgaaatgttcttgttctcccttgcctgcttggtgaacactcactaatctttcaagattctgtctatgccatttcctttgtgaagcctttctgactactccacacaccattagaattgacctctccctcattctgtgccctacagtaccctgtaaatgcttctgttttattacctacaacactttataatttattcattcaatattttggttttcctcttcgagactctaagctgctcaaggatatggactgttcttaggtattcttatatccccaatactcctggtgtataactttcattaaagatttattttctccctctacaattcaatggcctttaggatattcacaaatttatgcaaacatcccacaatcacagaacatttttcattaccccaaaaagaaatcctgtaccccttagtcatcattccccaattgccccatacctcccaggcctaggtaaccagtaaccgactttcagtctctgtgcatttgcttattatggacatttcatacctaggaagtcacatgatatgtggccatttgtgtctaccttcttttgcttagcatgtattcaaggttatccatatcatacttcgtttgttgtttttgctgagtattccattgtatggatataccacgttttgttgatctgttcatcagttgctggacatttgggctagttccactttttgtctattatgaataatgctactatttatgtgtaagtttttgtatggaaatgttttcaattctcttggatatatacctagcaatggaactattagatcatatagtaactttatgtttaaccttttgaggaattgccagactgtttaccaaagcattgcaacattttaaaaaaaattgaggtgaaatccatataacataaaattacccgttttaaagtgtgcaattaagtgacatttagtgcattcccagtgttgtacagccattacctttctacagtttcaaaacttcatcatcccggaagtacactctgtacccattaagcagtcactccccattctcccctctgccattccctaatccagtaatctgctttccatctctatgaatttgcctatttcagatatttcataaaataagaaccatataataggcaaccttttgtctcgcttttttcatgtagcacaattgtttttgaggtttatccaagttgtaacacctatgagcacttcatttttttatggctgagtaatattccattgtatgtatattccaatgtatataccacaatttgtttatttactcatttgttggtcaatatttgggttgtttccacctttaagctctaatgaataatgcttctataaatatttgtgtacaaatttctgtgtgaatattatgttttcatttctcttggttatatacctagtaatgaaattaataggtcacattgtataggttggtgcaaaagtaattgtggttttctccattactttttatttttttgagacagagtcttgctctgtcacccaggctggagcgcagtggcgcgatctcgactcactgcaagctccgcctcccgggttcaagccattcttctgcctcagcctcccgagtagctgggactacaggtgcccgccacaagtccagctaattttttgtatttttagtagaaacggggtttcaccttgttagccaggatggtctccatctcttgacctcgtgatctgcccacctcagccccccaaagtgctgggattacaggcgtgagccaccgcgcccggcctctccattacttttaatgccaacaccgcaattatttttgcaccaacctaataaatctatatttcacgttttaaggaactgccacactgttttccacagtgactataccattttatattccaaccagcaatgtgtgaaggttcttgtttctccacatccttccaaaatttgttaatttactgttttttttttttttttttttgttgttgttgttgttttgtttggtttctttttgagacagagtcttgttctgttgcccaggctggagtgcagtggtgcgatctcggctcactgtaacctctgcctccggggttcaagcgattctcctgcctcagcctcctgagtagctgggactacagatgtgagccactatacccagctaatttttgtatttttagtagagacagggtttcaccatgttggttggccaggatggtctggatctcttgacctcgtgatccacctgcctcagcctcccaaagtgctgggattacaggtgtgagccactgcgcccggccgataatttcctgttttttgattataaccatcctagtgggtgtgatgtgataactcattgtgctttttgcttttatttccctaatgaccaatgatgttgaatatctttcatgtgcttggtcatttgttcatcttctttgggaaaatttctatccaatttctttgcccatttttaaattgggttgtcattttgttgatgagttgtaaggttctttgtatactctgaatactgaattctcatcagatatatgagtcacaaaaattttctctcattctgtgggttgtcgtttcagtttcttgaagatatcctccaaaacagaagagtttttagttttgatatccagtttggtttttccttttttgcttgtgcttttggtggcatatctaggaaatcactgcttaatccaaagttaggaagatttatgcctatgttttcttctaagagttttaaatctttagctatatgtgtaggtctctgatccattttgaattaatttgtgtatatgaggtatgaggtgggggtacaaattcattcttatgaatttttatttatttttggtttaattttaaagagatgaggtaggttctcgctatgttgaccaggctggtcttaaagtcctggccttaagtgatccttctgcctaggcctcccaaagcgctgggattacagatacgaaccattgtgcctagcctttaaaaactgttttatttatttttttcaaattcatttttttcatgtggttatccagttgtcccagcaccatttgttggagagattatctcctcctgcacctcccacactgagttttcatggcatctttgccaaaaatcagttgatgataagtgtgatagtttacttgtaaaactctcaattccattccagtaacctatatgtctatcttcacatcaggaccatactgtcttgattactgtagctttgtagtaagttttgaaattgggaagtgtgagtcctccaactccattcttctttttcaggaacatttttttccatatgaattttaagaccagtttgccaatttttgaaaagaagtcagctgggattttgataaagattgtgttgaagcccagatgcggtgtgattcattcctgtaatcccagcactttggcaggcttaggcgggtgaatcacctgaggtcaggagttaaagaccagcctggccaacatgataaaaccccgtctctactaaaaatacaaaaaattagccaggcgtggtggcagacgactgtaattcagttacttgggaggctgaggcaggagaacggcttgaacccaggcagcggaggttgcagtgagccgagatcacgtcattgcactccagcctgggcaacaagagcgaaactccatctcaaaataaataaataaacaaataaataaagattgtgttgaatatgtagatcaatttggagagtattgccatcttaccaatattaagttctccaattcatgaacatgggaagtcttttcatgtagtgaagtcttctttaacttctttaaacaatttttgtggtcatcagaatatgagtttcacactttttttgtaaaatttattcttaagtagttcatttttgatactattataaagtttctttcataatttcatttttggtttgctcactgctactgtatagaaatagaactttttttttgtatttatcctgcatttgttatggagctcatttattagttctaatagtttcgtagttgattccatacgattttctgtatacaagatcatgtcttctgtgaatacagatcattttacttctttctttccaagcttgatatcttctacttttgtttcttgtgtaattgccatagctagaacttccagtacaatgttgaacagaaatggcaaaagtggacatccttgtcttattcctgatgttagggatgaagcagtcagtctttcaccattaaatatagtagctttgggttttcaatatcttctatcaggttgataaagtttccttccattcttagtttgtcacacatttttatcacaaagcctgttgaattttgtcaaatgcttttactagattagaatgatcatgtgatctttgtcttttattctgttgatgtgattgttacattgatttatgggtggtaaaccaatcttacatttctgggtaaaatccaaatatttctttttttttccttttctctgacagggaattgaacctgggctgtggcagtgagagtgctgaattctaaccactagacaagcagggaccaaatacatatttcttaaattgaatttatcatgagcacattatatgaggattgggtaaaaagtaactaaaaaaatggccaaagaaacaagatggaaaataacttccattttcagatagtaactatttaggaaacattgaaactttggaagtgaaattgttattgtgtaaatattttaaaaaagcatgtttatacatctttcacactctttgagtcttatatttttcctttaaagtcttggaactagacctttatgatattctaaatttaataacacttaacaacttgccctaaatatccctactttataacaattactgtagtggtttcctcatagatttgttttttccccatcccccacacccttcccaagtacacacccttcccaagtattatcccaagtgagactatcattatcatctattattcttattggacattttaaagtacctgtacaaaaatggcattagttagggatatagtaaagttacttctagtcttttaattggcttctgcccttggcgctgtttgagcaaagagaagagaccctcatagagaactctaaggacaaaaaaacttacttttaattgtgaccccaagaattatcaatatctctattaacagagacaagggcttcatcttctcttaagcagcttctcttcactgtaacacaggcagaaactaggtgattggcccaagagctcctcttctcagggactgtggtgggggcaggagtcagttgctaagcaaccatttccttactcttgggccaatgggctgccagagtgttcctttcaagccggaatgaaggcagctgctggagaatgtaggctgtggaaaggatccactgctattcctctggctgaagataaggggtaggctagaaattaggggtggctctctaacatgaaaggaagggaccagaagtccgactcgtacgtgtccacacgttcaactgtgttcaggggtgctggaagttcttatttttatgttgcctctagaggtacaaactacacttatgtaaaaacacaattaaggtacatgaactgatctgacatcatcctgtaagctggtatctctaggctatggcggaaaagaaacaatgggccaagtctgctttgttcccaatctggatgaaaatctttatcctcttttccagttagaaactgctgaggatttactggaacaaaggcaaacaaagactgtttaacaatgtctttacatacctcagataatacagacatctcacaagtggtaccttcaaagctacgagaaatcaaaatgaatatttagggaaaacatataaatattaaaaatatccaaggcacagagctagttgagaaattatgcctacaaaaaatatccaacttttacagtctgtccaggtcattactttagaaatagacattttattgttttgaatttacagttttattccttttattagtttcccattgctgtgataacaaattaccacaaacgtaatgggttaaaacaacaggaatttattctctcatagttctagagaccagaattccaaaaccattcttacagggctaaaatcaaagacaaggctagctcctcctggaggctccagggaagaatccattcttggcctggaatttttcagcttctaagtggctgccagcattccttgatttgtgaccacatcatttcagtctctgctcagtcatcacttgccttctgtagtttaatctccctttgtgcccctcttataaagatacttgtgattacatttagggcccaccaacatgatccagaacaatctctctctctctcaagatccttaatgttggctgggcgtggcagctcacacttgtaatcccagcactttgggagcctaaggcagttggattacttgaggccaggagttcgagaccaggctgaccaccatggcgaaaccccgtgtctactaaaaatacaaaaattagctggacgtggtggtatgcgcctgtagtttcaggtactcaggaggctgaggcatgagaagtgcttgaatcctggggccaggggcctgaggggtggaggttgcagtgagcagagattgtgccactgcaatgcagcctgagcgacagagtgagactccatctcaaaacaacaacaacaaacccaaacttctttataggaaaatcaatgagcaatgaaggcatataaggggaagcggcaaacaaaggtcaggtagggtcagagtcagggaaggctttgctagggagtgatgttcaagctgaaatatgaagaacgagagtgagtcagctaaacaaatcatgtcccaggtgttgcaatgaacatgttaagaggctatgtgggctgggtgccgtggttcatgcctgtaatcccagtactttgggaggctgaggcaggtgggtcatctgaggtcaggagttcaagaccagcctggccaacatggtgaaatcccgtctctactaaaaatacaaaaattagccgggcatggtggtagatgcctgtcatctcagctactcgggaggctgaggcaggagaattgcttgaacctgggaggcagaggttgcagtgagccaagatcgcgccattgcattccagcctgggcaacaagggtgaaactccgtctcaaaaaagaaaaaggctatatggtgttccagaacatgaaatgatgctctgtgggctggaatcagagactggggaatgggggtggtatggagcatagtataaaataaggctgggttagtaggtgatagtcactccattcttaataatttaattgttataaaaagactgtattagcctgtatgcaacaaaataatatagactgggtgactttacacagcagaaattaattttctcagttctgatggctagaaatctgagaccaggttctggtgagggtcttcttcctgcttgcaagatggctaccttcttgctgtgtcctcatatagcagggaaagggggtgggaggagaggatgaaagagatctccctcttcttataaggcctcagtcctattaacctcactcacccttatgacctcatttaaacttaattacttcgtaaagacctaatctccacatttagtcacattggagattagggcttcaacatatgaattttgggtgcacgtaagtcagtccatagtaaagaccaccagaaagtcattgaatgacttacagaagtgagaagacgtgatcacttctgacaaggtatcactagatgcagtctagacaatggacagaagaggggcaacagtgggcatgaaggccacttaggaagtctttgcaatagtccagctaaattcagactaagtttactgcaatgctgttggaaagtagtgattccagacttatacagaccgctcaataaaattgcgtaggtatagcaaccgatttgatatgagagtgaagttataagaggtaccagggatggtgcttaggtttccagatttttcaactaaacgggtaatggagccattcgaagagatggggaaaactgggagaaggagcatgagttcagtttggtacacggcacatttcaagtactttagggatgttaaatatttaacagttttgaatgataatggtattttgtcagagtgattaatactaaatgctggaacaaatgccctctacatacttttaatgtgctttcacacaataaaagttccagttctttgagctgacatgaaagaaaagataatcaatagtgtaatgttcctaagaaagcacatgtggaaggactggctggaggctggagtgcaaacagcttctctgttgaagggaaggtgtctagtatgatgtacttgtcttacctttcacatttctacataagaagtcaatatcttttctacaaaatctgcaactgttcccatattgcttaatattagcattgctattttgcccccttacccatcctatgaaatgtttttcttttcttcctcacctttctttcaaaatctattgcattatcaggttttatttattcttccctggtaatgtctctaatcaaagacctctttctatttctagtgccaataaataagtacatatttttattactagctcaaatgtcacttccttcttgaagccttctttatttatcccaaatctattttttttcgtatttcacagcattaaaagaaaaacaggctgggcacggtggctcacgcctgtaatcccagcactttgggatcacttgaggtcaggaggtcaagaccagcctggccaacacggtgaaaacccatgtttactaaaaaaatacaaaattagccaggcatggtggcgcatgcctgtaatctcagctactccagaggctgaggcaggagaattgcttgaacctggcagaaagaggttgcagtgagctgagatggagccattgccctccagctgggggacaagagtgaaactctgcctcaaaaaaaaaaaaaaaaaaaaaaaaagacaaaacaaaaattaccttaccatgttgtgaatcatccttatgagagtgtcctactactaaaaatattccattctttacaattctttttggggcctcccccctttcttccttttctcttctattattttttaaaaatgtgttccaaataattatttgcccaatatatataacaagtacccaaactgccaaataaatgtggatttacaacatccactcaattagccttgaagatgatctgatatatagaaacacaacaaatttggggggagggtaccaaacttctaaattataggtcaccctactcatgtggcggactttagtgaaactggattttcagaacccgccaggtgagtattatccagaatcaagccagctttttggacctgcgtcttaacattaagcaattggtagaataaagtaagaccactcggctctggttaacaggcatctggatttgttttgacgtaagacgtgttttcaatataacattttggttgtccgcaacttcttggttcttaaaaccgtcttgagtatcgcagtctacatttgttctttctaaacttcaccaaattccaatgaaatttgtaattttcactacaggtttgaggagccaactgcatacgatgtggaaccatttgccaatactttcatttcttttggtcttttttagttgcccacccagaggaaagcatcagattacctggtgaaaatcctcctcaacagggcagttggagtgagcacggacaattcgtgttgaccctcggtctcctcccacttctacatcctccaagtccctgaggcggctttccgctagctcgcctgtcacttggcgcacctggctctacaggccacgccctcaagtcttccaagaggccagcggtaagcgcggtccacctccctctcccactaggcgtcggcttcacgccgcgcccacgtctcgaggacagctccagccccctcgctccctggctccgccccctcgctccctggctccgccccctccagctccctagcgtcgtcggcgtcgagcccgagcctgcgcctgcgcgtgcgccctggggcccaagttggggcgcgccgtggctagaacacggagagcggcgggcagtgcagccaatgggaggcggcgctgcctagcggctggtaggcggtgcctgcgcgggtgttaggttagcgcgaggcgtgacctagttgacaggctctgaggtgctgctgtggcggcgtccgcggggctgaggcgggtgggagccggagccgagcgcgggctgagggaggagggcggcgactggagagcggcgagcggcgagcagcgcaggacgcagagcctctttcactttttccctgctgagtgccccctcccacccctcccactccacacacaccctgtttgcccgtgagcctggggaacttgcagcttaaagccagccacccccacggcaacatgtaccccagcaacaagaagaaaaaggtgtggagagaggagaaaggtaaccggcccgtcgagtcctgggggtgcgggcggtgggggttagggtgggggcgggggtcaggctgtgtgtgccgcggcgccctccgcccgagctcccgcctcgcgccctcccggccggtgccgcctccctccggtgtccgtgtgtacacacgcgcacactcgcgcgcactccggcgtgcacgcgccgcccctgggcacctgcagctcgcgcacgtgtgggcgcacgcccctctctgttgccctcggcaccccgtcaccttctcccgaggcggtgctgcgttcgcctcgcttgcggcggggacccccaggcggcagccccgggcgcggcacaagttcctctgcaccgcagctgggacttgggcactgccggcctgggtgtcccgcggacaggtgcccgtcggcgggcgctcaggctgcagctgccgctgtgcctccgcgctccgtgcaccctcatttctttccttctcgcccctgtccccccagcccccgaatggcaaagcgtacccaccatcgggtgtttaccccttgtctaggtttccttccttcgctgccgcagcgtgacttttgaaacctggaactctaggggagccctaaaacgagcgtgttgtccgtgaggataagtgccttcagagaagtctgaatgggctgttctcccaacagtgtgtttctctgtattccatccccattcatgggctgaagttgctcagagtaagattttgtgactaatgtcactctgtatgaacccatctctgaattttgtgcgtataaggtttatctaaatcagctagattgacagtggcactgattctttaagaaacacaagtgtacgatccagcgtctcccaccaagatctcccgcttatcccatcacagtttggtaatattctaacttgagtgtctctggcgtttttcaccctccttttcacacctctttccttttcattctttagctatttacagaaatgtagcaaaaacttcttgcactcctattgctaaaataaactaaaacctgtatagcaagggtgaggtctattgagggtagtgcgcatttctcctggtacctcatctttacaaaaggatataggggtgactaggtatcaagttgatttccttgttaatagttcgttaaaacctgtagatttttattgcaagtcccggcctttatgaacacgaaggcaaaacagtggaggtaagaaagggaattaatgtggaaaaagaatccactatataggatcggcttccacaatgcacgaacaaaggcgtgaggagggaattttttttttcaaatttactgcaggaagatttaataatagaaccgaacaacacaattaaaatgatctttaaaaatgttgaaagtttagtcatttaattatgttttaataattatgggtttatagagagctaacacttctggtgttataaatcaaatgctgtcgagagtaatagcctgatagataaagtagtgtaaaataattttgctttgtttttttcagtagtagttactttagtttcaacacactttcaacaaggatttgccttgtgagcactgaaaaatcatttatgcccatgtttattgatgatgctgaaatgttcgctttgtataattgatgataatgagggcaaaacagtggaagacatagacattgttttcagtaacatgaatcattgatgaaattatagtgagtacttaagaactatttttctgtcataatagaaaaacagtgttcctcaagtaataacgttataatgtttccttcatttaacatctacacagttggactgtgaccagcaggcattttagaatcttttttaatgtcttgatttcttttcttctaataatggagaatatataaccaattttttttcctaaggaagcaaatgcaccattaaataaggcaattaacaagtaattatccaaaactaagttatttttgcatgaagtttaatgttaaaggaaaacgttactgcgatacgaagactttaatgcatatctcagtgtttctttttttcaggatgtctatgtttggaatatttaaatataaaatatatattatacccccaaggaagagctaaggatttctagtaccatagttagtattagagaagctgatgggatgcatgacctttttcctttcagcccactgggaagctgatggtatagtatttttgcagctgtcctttaaagctaaaggaaggcttacctacctcattgaaatgtcaaggcattctataaacatatttttaactcagtataccatttaataaataggtctgcctacttaattgcttggttcacagagaaaggactcattgtaaaggtgaagcattctttaaataaaagttttatgaaatgacaaagaaaatgcatatatatttgtggcctccagtatgtttcattgtttaaacaagtaattaaggagttctgaagaccacatatgtttaaataaacatgtttgatctagtattttgagtcctaattcagaaccactaatgtgcattttcaagtattgcaacttatttcattgttttgttttaaattgatctcgtttttaagtgttcacacttcaacttttaaataactggaacaacagaggccaggttgcatttctgtatgtaccttttgacattcacaaaaactgtcagttgcttcataatgtcttttaacctgctcagtaatattgtaataattttttatttgtgatctgagcttttttagcactgctttggcatactgctaatcatctcccttttctgcctttatgtgataattctaaatttaccattcccttcaagtttcctgttctctcaagaccctatcccccatactaaagagatgacattgcctttttaattcacagagaagggctaggcgcggtggctcacacctgtaatcccagcactttgggaggctgaggcgggtggatcatgaggtcaggagattgagaccatcctggggaacacggtgaaaccccgtctttactaaaaatacaaaaaattagccggtcgtggtggcacacgcctgtaatcccagctactcgggaggctgaggcaggagaaacgcttgaatccaggtgggagaggttggagtgagctaagatcgcgccactgcactacagcctgaatgacagagcaagactccgtctcaaaaaaaaaaaaaaaaaaattcacagagaaaataaatgccatgtaatatgaacagccctaacatcctcttgcatagtctcattggtctgttcctttacatgtccttttgactttgttctatcttagaggaaggacttttcttccttgtgtgtaagatgaatctttctgctgtgctctttatcccatatcttctttgagttcttgcaccatcatgtattctttcttgggtatgtttaatttcttggtgtcttcaggttcctctccattgcctgtaacagtgctcggatctcttccaccttagagtcacttttctttcatagggcttcacgtgaacttggagttgctgttctcactttccttcttttgctcagtccttcattgtcttctggatttccgttatattctaatgaaactaatgttcctgaagtcattcagtagtaacagtcatgatagtattcatgtaagaatagttaatatttaagccccatttgtatgctcagtactattcttagtagcttacatggattatctcatttaattctcacaacaaccctatgaggtaggaaactatatgaggcgaaatattgtgaggttaagagctttgaataccagttgcctgggtttgagtcctacttatactgcttaactagctgtggtactttaggtaagttatttgacgttgtttatagtttccttatctataagttgggaataatacctgcctacttacctcgaagggaaactgaaacataaagaggttaagtaacctacagatttgcaccatttagattacaactcaaacagctctgttaaccacttttcctctttattccatgctgttggtaaccacattgataaaagcaggttaatggctaagtaattttcactttttctgaccttcctgtagcagtctgtggtatttcccttagtgcacctgtagtcccagctactcaggaggctgaggcaggagaatcgcttgaacccaggaggcggaggttgcagtgagctgatatcgcgctactgcactccagcctggtgacagagcaagactctgtctcaagaaaaaaacaactctgttttctgaatgtttccttgtaccaggaacttgcacccatggtgacaactacgatttatttcattgttttcctatttgtgcccacttcctaaatactgtgttttgaggtttgatgcttccttccgttccctcttctttttcctttaggactagaattttaggttatattttctaaagtctctaggctagaccactctttaaatttccagattcttgatttcaacttcttcaatgtcctataggtaccttaaactcaatttttgtgaatatgtcacctctgattaagataccttttttttttgtctcctaatgtggctgaagttctagttataggagtgggaaaaatattggttccccattttctgttcacttgtgcttacattaatacttctgtagtttatttctgtgaaatagtcttttaaagtggttattttttgaaggttagattaccttaaactagatactaactatccctgcatccatttatctaaactgcagtaccttgtgatacactgaaagagaattgcagagtatgagaaataactgtctctctctctcactctctacatcgtggagaccattggtatggtatgggagacatgaaagctgacatacagagtgaagaagccagtgtcagtttatacattgaatattggtaaatatttcttccttgtttaggtgaaaaacgaatgtaaatagaattatttgcatgttttcctgtgtcctagtgggttgttttatacaccctctgggaaatgcataatcaactttcaatattagtagtctataggataaaggttaaactgctcactatggcatacaagtccctgtacagttttgttttacttttgtttccggctacttttcacttctgtggccattcctcttctcataccatatcttgcagcttcatttagttatagtattcatacctcctttgtttacattgttttgttagtctgaaatgttctttttacctcttcatgcaaaattcttcctgtcctttgtgaagcagcatacatattacctttttcggggagttttcctgagaatgtagtgtagtacagtggaataaataacatagggtgtagtctttgattaatggagatgtttgtctgaattttaattttggctcacttcctgaaacctctcttgctttgggcaaactactttgctgtgcttcatttccctatctgcaaaattggcataataatactatcaattttatgagttattaggaagattattttaatgagatatacatgtgaagtacctggccatagtgagttctttataaatgacatccactctaattctaagatgcaatttgtaaaatattttcattttatcgtcaagatatatatatttaaagcaattcttatatcatctacacaaagctgtaagtaaattgatagtgcagttgaggaaatatcttggtggttgcctttttttgtgctcttactatttgtacatacctgtcttagcattttatttatatagatactattttgtatcttactgtgttagactgttcttgcagttgctgtaaagaaatgcctaagactgagtaatttattaaaaaaaagacgtttaatagactcatggttctgcaggcaacacaaggatagcattggcatctgttaggtcttctgggaggcctcagggagcttttacttacagggcaagatgaagcggagggagcttttacttacggggcaagatgaagtaggagcaggcacttcacgtggcaagaacagtagcacgagagggttggggggaagtgccacacactttcaaacaaccagatctcacgaaaactcactatcttgaggctagcaccaggccatgagggatctgctcccatgacccaattacctcccactagacaccatgtcacacattggggattacatttcaacataagatttcaggggatatatatccaaaccatatcacttatccagcatatcacctggcccatagtaaactgtagatgttgcttgaaagtgtaaatgagtttacttatttcttggactatcataagagagtcttcatcaggctttgatttttttctcccctggtaatatgaaatttaacattttttaacatttaaatatggagtcactggatttgcattgtgttcttcaggactgtatcaactcttttgttagcttaacttggttaatacttaaagtataaaaataattcccatgtttaaacgttaaatacaaatggagattctgcttttattttgcaagaacgtttattgaagatgaccttagaagagagacgcaaagaatacctaagagactatattcccctgaacagcattctatcatggaaggaggagatgaagggcaagggccaaaatgatggtaagtttctcggaacattttttaggtagatatttttcccattttaggacaattgttgacagaaatgaataactggcgttcaataaagagattactattttgctatttgaaattattgtttggttgtgatttaattgtttttagtaacctacggtgttttttaaacttaggaaagtatattaacataatttgtgttctgaaatataccacatttataatatggtactttttttacaggtccttttttattttttctattctgtaacagttcttggagcaaatgctattagagatttgctgctttggtggtgtggccctttgagtttgctttaagttcatttataatcgattatcttatgttatttttaggattggggatacagctgaaagagagagtatattaggaaaaatagaaaaaccaaagaacatttctcattattttagagaatatattttgtatgatgtgttattatgtctgtatgtaaagtatttgtatgacagaatttactctcaaagtctttatgatttggtgggaatctagattatgttagaatataaaggaagttttaaggattaaaaaggtacgtgaaaaagtttctaaaaacaacataatagatttaatggatgtttaatatgcttgtctttgaattaacactcgttggtattaatgatctggatgtgaagtttagacaaacggtgcttcttaaggtgcttaacagttgagaaagactttatgaaatggacttgaaacatgctaatttcaaaggttgtggtcttagatcgatggaactacaccgggtactatgggcccagaataaagactagcatggaattcctatggataaaatctgaagggaaagattaggccttggtgtctgtgaagagaacacattgacctgaggatttgggttttagacacaactttgtttttctagaaaggcaaagcatgtgggattagcagtgaaaagctgtgggttcttttagaccttacgtagcctggaaacgtgtgaccttgggcaagcggggtagcagctctaccccacgttctaatggggtcattggacaagctgattgggatgtgcacatctgacctgtctgcccagtgtcttctgtaaatgcaagttgttttaagaatggtctgattccaaactgataagattggccttaagaagcccctgcctgatcacgtgagcatcatggaacccaaagatgatttgctgcccaccaccccgtctcagaacagaagggtgggaagccagagccacctgcattgccctagccagtccccacagtgtaacagggtctccttggcagctgtattctggagtctggttgttgctctgtaaagacctttaataaaatcttgtacaaaggttaaaaaaaaaaaaggtctggttaagacatcattgaaagagaggagagtgctgtgtaatgaaaagaatacagggctagaaatcaggagaacagaattctggtcctctgtcttacctaaggctatgtgcctcttcatgtttgagtctcagtaatttctttttttgtttataagcaactggtattgaatatttcagcagcagcactatcttcttcttttttttaaatggctacaggtcgagtatcccttatccaaaatgcacaggaccagaagtgtttggggttttggattgtttggattatacttgctggttcagcattcctaatccaaaatccaaaatgttccagtgagcatttcctttgagcattatgttggtgctcaaaaagtttcagattttggagcatttgggattttgaatttttgcattaggactactcaacctgtagtaaatgttccccaaattagaaaagaatacattgaatagaataacacctaacatagttatcctctaacaagatattgcatgtttaatcctgcctcccaatatgagctttataagtggttacaactgctctgtgtgtttcttattttcccccttatgctgttttaaacttgaaagtcctccatggggaacaaggtgatgtgatcaaaattatatttctatttttcctgaaatgttacttgcttctctctgttgtgacccagactctggtgaatggcctcttcctttttcatgaagtggaatggctcattttacaagtaatatttgtaaatatttatatacaatacacatttttcatatgactttttcttgtgttacctattcagtgctcagttattaaaaaatattagtcaagagagttttagtgttttaacagtttaaaaatcctttaaaaatataaatttacaaaaaataataaaggaaaactatacatatggttatatttgaaacgttttaagtcattgcttatacatgtataagtaggtattgatatttattaaatatgggattttaaactaagtattaaaagaattctataattccttgtcacttagtttctaattataggaaatgaacaatatttatcgggttagaacagtatatcagttttaaatttaatatcttatcattacttacgtttttatagaggaccatttttgcctaaatattcctgagtacttgaatagttcttgagctattgcttttaatttttttcttgctttgttcagatttattttactttaaccaaatgcttcttgttattataatacaatagaaagttaaataaaaaagaggggagcagccaaatatatttgtaacaatttggattttaagccttcttgaaacaaaaggaaacaaaatattgccaaggaacacaaaatcagtgtttatatggaaagggggaagcaagttttattttgacttacccctttggtaatattggaaagccatggattggaagaggaaagaatgggagatgattaccaaaaaataaaaataaaaaaacccaaaaaacaaaaaccccatccagaaaaacccattaaatacataatttgcttgctgtttatgttcatatttattaactgttgttagctaatttctagacttacatatttctaattcttcctctgtgttaccaattatgtaataattcaatatcatttgtcagttgctatgttgtggggattttaaaattcttgtctctcctattgtactgtctctagcacctggaatggtgccttatgggttggtggggcttaatcgtaagttaaataagaatgcctgaagagttaataatctacaagggacaattctttctccaaacttttttttttttttgagactgagtctcacttactttgtgccccgggctggagtgcagtggcgcgatgtgggctcactacaacctccacctcctggcttcaagcaattctcctgctgagctcctgagtagctgggattatagatgcgtgccaccacgcctgactaatttttgtattttttgtggagatgggctttcactgtgttggccaggctggtcttgaactcctgacctcaagtgatctgcccatgttggcctcctaaggtgctgggattacagacgtgagccactgcacctgcctctttttccaaacttttaatgagcatttataaatatatgtaaagctagaatacagtcatgtgccacaaaatgatgttttggtcattgacatcctgcatatatgatggtggtcccataagattataatactgtatttttactatgccttttctgtgtttacgtaggtttaaatacacaatgacttaccattgtgttatagttgcctacagtattctgtacagtaacatgctgtatgggttttagcctaggagcaattggctgtaccatataatctaggtgtgtatagactgtgtaccatctagatttttgtagtataccttacaatgtttgcacagcaatgaaatcacctaacaacgcctttctcagaacgtattccattgttaagcaatgcctgactgtagcaatgcatccattacccagtttcaacagttattacacggccaattttatttcatctataccagtgctccctataccttccccccagactattttgaatgaaatcacatatgtcatataaattttatctataaatgagtatctgtgtatatgcatatgtatgtatctctaaaagatggcatatttttgttgttttactaaaatactattattacctctcacatttaaaatttaacttaaaatttaattttgatataattaaatatccacttagtattcatgtttttcccattgtctcataaaggattttttcttttacaattgatttgcttgaatcaagatctaatcaaggtccatatattgcatttaattgatttgttccttaagtcacttttaatctatagttacctttctctgtccttttttccttcctcccttataatttatttgttgaatacactaggctgtcctgcagaattttttatattttgaattttgcttactgcatctctgtggtatcattgaacatgttcctctgtcccctttatttcttatgagttggtagttaaatccagaggtttgttcagagtggggtttaaatttttttgaaataatgctttatagattattgtacatctttttgcatcatatcacagggcacataatgcgtcattgtctccctcagtagtgataagattgatccctgggttcatgtattgtcagctgaatattgtcactaaactgtctggtgtaaagttctctgacaaccttttacctaatggttttagcagccattcgtgattattgcttagatccattacgttattaggggttgcaaaatagtggtatgtgaattttatcattccttatttatttgtcagacttctataaagaggaactttctgttattaagtcttttattatgcagtacggtttataaaggaaagcagaataaatgccatatttcccttatttactgattttcagattgagttcattccctaaaatcctccacaggtgaccaaagagtcctttttttaaaatttttgactatcattttcaatttgccccttccttctctcctcttctctgtctcttcctccctcttcctccctctcaacatgtatattaaatgagaatgtcccagtggttaacagtctacaaaggaggcatatacgtgtgtgtttgtgcatgcgcgtgcatgtatttatagctcccatataaaatacatagaattactaaacaataggcccaggatatggtagaaagacaaaggtagatatataaatgggtggatgggtagatatgatagaaagatggcattacttctttgttgagacaagagttctagttcttgggtttaatagttatgccttctgttaatctcctttcctactactgtgttaaggctccactagaataccacctagagaagcaatgttattgttacactttttggatggagtagtgttggcagagactctgccaggcttatgctaattttctctgactggttagtatcagggaaagcagctatggctataagtttagattgtctttttgagtaattacttttaatgtttatacagaacagcaataggggaaaaataaaataataatgaggatgagttaggtgaaaattataaaattatcttatactcaagtataaaatatttttaaaaattggtcatttaaagagccatctatgataataccatactgaatgggcaaaagctggaagcattccccttgaaaacgaacacaagacaaagatggcctctctcaccactcctattcaagatagtgttgggagttctgggcagggtaatcaggcaagagaatgaggtaaagcgtattcagctagaaagagaggaagtcaaactatttttgtttgtagatgacatgatcctacacgtagaaaaccccatcatctcagcccagtagcttttcaagctgataagcaacttcagcaaagtctcaggatacaaaataaatgcatacaaatctctagcattgctatacaccaaaaacaggcaggccgggaggcaagtcacaaatgagctctcattcacagttgccacaaaaagaataaaatacttaggaatgtggctaacaagggaagtgaaggatctcttcaaggagacctacaaaccactgctcaaggaaatcagagaggacacaaacagagaaacgttccgtgctcatagataggaagaatcaatattacaaaaatggtcatactgcccaaagcagggtatagattcagtactattcctattaaactactatcaacattcttcacagaattagaaaaaactactttaaaattcatatggaaccaaaaaagagcccaaatagccaagacagtcctaagcaaaaagaacaaagctagaggcatcacgctacctgacttcaaactatactacaaggccaaagtaaccaaaatggcatgggactggtacaagaacagacatagaccagtggaacagaatagaaaacccagaaataagtctgcacacctacaaccatgtgatctccgacaaacctggagatcacaaacaagcaatggagaaaggattctctatttaataaatggtgctgggaaaactgcctagtcatatgcagaaaattgaaactggaccccttccttacaccttatacacagattaactcaagatggattaaagattttaatgtaaaaccccaaactaaaaatcctggaagacaacatacgcagtaccattcaggatctaggcatgggcaaagatttcatgtgaagatgccaaaaacaattgcaacaaaagcaaaaattgacaaatgggatttaattacactagagtttctgcacagccaaagaaactctcagcatgaacagagaacctacagaatgggagaaaatttttataatctatccatctgacaaaggtcttatatccagcatctataaggaacttaaatttacaagaaaaaaccaaacaaccccattaaaaatagacaaaggacatgaacaggcacttctcaaaagaagacatacatgtggccaacaaacatatgacaaaaagctcaacattactcatcactaatgagtaatgatgcaaatgcaaatcaaaaccacaatgtgataccaactcacaccagtctgaatggctatcattaaaaagtcaaagaacaacagatgctggcgaggttatagaggaacactgatacactgttggtgggaatgtaaattagctcaaccattgtggaagacagtatgacaatgccttaaagacatagaggtaaaaataccgtttgacccagcaatcctattactgggtgtatacacccaaatgaatataaatcattctattataaagataataaaagaaggcgtatgttcattacagcactgttcacaatggcaaagacatagactcaacctaaatgcccaccaatgatagactggataaagaaaatgtggtacatatacaccatgcaatactatgcagccataaaaaggaacaacatcatgtcctttgcagggacccggatggagctggaagccattatgctcgacaaactctaacgcagtaacagaaaaccaaataccacatgttctcacttttatgtgggagcagaatgatgagaacacatggacacattgtggggagtaacacacactgggcctgtcagaaggtaaggatgggaggagtgagagcatcaggaagaatagctaatggatgctgggctcaatacttaggtgatgggttgatctgtgtagctggccactacggcacacgtttatttgtctaacaaagctgtgtgtcttgcacatgcacccctgaacttaaatgaaagttggaaattaaaaaaaaatttggtcatttagaaagactttatatttcatatttttatacatgtttatctgtattacatactataataaaggaagctagagaaaaagtgctattaagatcataagagaaaatctacttactgtttattaagtggaagtgggtcatcacaaaagtcttcatcttcattgtcttaacattgaataggcttaggaggatggggggctggttggtcctgctgtctcaggggtggcaaaggcagaaaaggtagagggaaggtagagggggaggcaggcatgcgtgatgcagcttcacagaaatacattgtaatttctgtctgacttttttgccttttcatttctctaaaaatgtatggtaccaatgctttaatcttttttccagtgcttagtttcagtgcctatgtcatagaaggttctatgtcataaatcaaaaacagtcttgaataataggaacccttctgccagattgtctaatgtcagtttgttttctggcactgcatctggtatgtcttctttctcattgtctggcactggtttggaagcactcatctccatcaagttttcttctgttaattcctctggtgacctggtgtttgttagctcttgaatttctccaggatctgcatcttgaaacccttcaccccctaccctttttgccatattcccagtctctttcatgatttccttgattgactgtgtcataaattctgtgaagccatgtgcaacatctggacaaagttttctccagcatgaatattgttttgggcttgatggttttcatggctttttctataacagcagtggaattttcagtggtgtaattcttccaaactttcatgatgttctatcagggttctctttcatagcattcacagtcttttccatagaatactgtgtgtagtgctgcttaaaggtccttatgaccccctgatatagaagctgaattatagatactgtgtttgggggcaagtagaccactttgatatttgtggtgttgaactcatggggttctgggtggccaggggcattgtacaacctcaaaataactttaaaaggcagtcccttactggcaaggtgcttcctgataggagcacagcgtctcattatctaggcctttcttgtacaaccaaaagactggcagctggtgtttatctttttccttcaaggtttggaggttagcagccttataaatgagggcaactttgatcataaacctgactgtatttgcgtaaaacagcctgtcccttcctgttttaaatcctggtgcttgcatctcttccttaataatgaatgtcttttgtggcatttcccccccttcagaatagagcacttttgtctgcgttaaaaagcctgttcaagtagatattctttctcttcgatttttttttttttgtaagacggagtcttgcttctgtcacccaggctggagtgcagtggcccgatctcggctcactgcaagctctgcctcccgggttcatgccattctcctgcctcagcctcccgactagctgggactccaggcgcccgccaccacacctggctaagtttttgtattttttagtagagacagggtttcaccgtgttagccaggatggtcttgatctcctgacctcgtgatctgcctacctcggcctcccaaagtgctgagattacaggcctgagccaccgcgcctggcctcccctatgattttcttaatggcatctgggaatttgccttctgcctcttggtcaacagtagctttttctactattattgcgacttttctttttttttaaaggcagagtctcgctctgtcgcccaggctggggtacagtggcatgatcttagctcactgcaaccttcgcctcccaagttcaagtgattcttgtacctcagctacccagttagctggggttataggcatgtacccccgcccagctaaattttgtatttttagtagagatggggtttcgccacgttggccaggctggtctggaactcctggcctcaagtgatccaccctcctctgcgtcccaaagtgctgggattacaggtgtgagccaccgtactcagggtgtgacatattttaagacagacttctttataacacatatcaaaccatcctttgctggcattaaattcttcagctttagatcctcatcttccttaatgctttaagttgtcatataatgactttgctttttctcaggtcctattagtctataggtatgctcattcttctagcaatcctgcactcacataaaagctgcatttttagtatgagattatcagtatgagattaaaagatattatgcaaaaactgcaaggttttcggacctgcgggcatagctgtagtgatgcaaattttctttcctttttttaataatgactcttaggctggattcatgtatcttaaatggtgagggattgcagctgcagacctaaatatcaagcacttcagctttttcttttaacgtcatgacttttctctgcttcttgggagtacttccagcattattaatggcactttgtgtgggtctgtgatgttattcaggtttatggtattgcactaaacatgataaaaaatatgtgacaactgcaagagatccacttttttactgtgatatgcaatttattggagagacagactgtttacgcagaggtgttcagcctcacacagcattttaagtggatacttgaaatacttgaggtcaccgcaatagcaatagaaggtggctaagaaatattacagtagtacagtatgtactgtggttaattttgtgcagttgtgatttagtactgcctctttacctttgtttacctttctcttgactgaatggcgccatgtatgatctataagtgtgtgcataagttttgataaattttcatttttgtaatagatttgggtatattttatggtagtaaatgatgaaatagactagtgtctacatgtattttaagcattcatgacatactttttcttaattttcatatttctagactatgtggtttgtctgccagtttttttttcaaattgttgcaagtctctaaaaaatgttccaatatatttattgaaagaatcaatgtataagtggacctgtgctgttcaaacctgtgttgttcaagggtcaactgtactttctttttttttttttttttgagacgaagtctctctctgtcgcccaggctggagtgcagtggtgccatcttggctcactgcaagctccgcctcccaggttcatgccatactcctgcctcagcctcccgagtagctaggactacaggtgcccgccaccatgcccggctaattttttgtatttttagtagagacggggtttcaccgtgttagccaggatgatctctatctcctgacctcgtgatctgcccacctcggcctcccaaagtgctgggattacaggcgttagccaccgtgcccagctggctcaactgtactttcctaagattattttgacaacacatcaatttcattgtgtattgcagtgtgtaccattaagtattatgtaaattgtccttatattaagctttttttttttttttttttttttgagacggagtttcgctcttgttgcccaggctggagtgccatggcacttgaccttgtctcactgcaacctccgcctcctgggttccagcagttctcctgcctcagcctcccgagtcgctggggttacaggcgcctgccatcacgcccagctaattttttatattttagtagagatgggtttcacgatgttggccaggctggtctcgacctcaggtgatccacctgcctcaggctcccaaggaagcttgtttttaaaaatattgtaaaaacaaaacccccaaatctttcattttttgatatatataaacatgactttgtgttgacacaagatggaaaattctttctttatatttcttaagtctgtaacttcatcacatagtctactagttttctttttaacatattaaatgaattatgttagtaaataaggattttccttaaatacattttggtcagcgtgaacagatattttgacatgggttacagattggtggtagccagagacgacaacttttcctttcttgctcccccctcccccccacccccaataatttttgcataggagagagtcttcttaatgtcttctttcagatgtattcatttagtttatttttaagttgacagagaaattgtatttcataatgtttttgtcttttctgaaatatttagttactgaattttcatcaacgtgtttaaaacaagaatttaagtatagcttattgatttatctaagcctttgatttggaaccaggttgaggattgccgatgaaataagtaagaaaatatcgtgccagggcaatgaaaacctatgaagatttttgagcaggagagctacagaaacttcaatacgatgagaataaattggcaacagttcatacaataatttagagggtatgcagtttccaccccttaatatcgtttttgcttctccagagttaattcacttgccattttttcctcctgcagatatatctgttcttctttcatagcttttctgtgttcacttatcataccagttcctcatttaattttctctgtttccttcaataaccgaatacatctgttctttcttgattaatctttacttgcttttctttctgtttttttgttttgttttgtttttttagatagggtcttgctgttgcccaggctggagtgcaatggtgcaatcatggctcactggaaccttgacctcctgggctcaatcaattctcctacctcagcctcctgagtagttgggactacaggtgcacacaaccatgcccagcaaatttttttttttttttttttgtagaggtggggttttaccatgttgcacaggctagtctcgaactcctgggctcaagcaattggccattcaaagtgctggtattacaagtgtgagccactgtgcccagccccttttcttgagttctcttgtttcccaatctactcttgtaaatttaagctttttaattatggtaaaatatacataacatagaatttgccatttttactatttttaaatgttcagtttagtgacattgagtacattcacagtgctgtgcgacaatcaccagtatccattttcacaattttttcatattcccagatagaaactttgagctgggtacagtggcttgctcctgtaatcccagctactcaggaggctgaagcaggaggatagcttgaggctagaagtttgagaccagccttggcaacatagtgagacttcatctctaaaatgaacattcaaaaaaaactggtggtgtgcacttgttgtcccacctattcaggaggctgaagtaggaggattgcttgaacccaggagtttgaggctgcgatgagctgtgatttgcactactgtactccagcctgggcaacagagtagacctcctctcttaaaatgaaatgaaagaaactttgtaaactttgtacccattaaacaatatctacactatacagtcttccttctcacctgtcccctcttattcttgactgtctctataaatttgccagttgtagatacaatcatgtaagtggaatcataacatgtttatctttcatgtctagcttatttcacttagcataatgctttctggattcctccatgttgtagtatgtgtaagaattttattatttttaaggccgaatattattacactgtatgtgtatagcacattctgtttatccatttaactgttggatatttgggttgtttccacctttatcaactgtgaataatgctgctatgaatattggtttagaagtatctttttaagtccctgttttcaattattttgggtattaactaagagtggaattgctagatcacatggtaattctacttaactttttgaggagacacaaaacttttctgtagtggctatagtattttacattccaaccgccagtgctattcccaccaccaatgcacaggggttccagtttctccatgttcttggccattatttattttctgttttggttttggttgtttgtgcttttgatgagcatctttatagatgcttattggccatgtgtatttctttggagaagtatctattcaaatcctttgtccattgttgagttggatttccttgttgtaggaattcctttgtatgttctggatattaattccttatcagatatattatttgcaggtgttttctcacactttgtgggtcgtcttttcactctcttaatagtgtcctttgattgaaaagtttttaattttgatgaagtccagtttatctgttttttctctggttgattgcttttggtgtatattctagaagacattgttaaatccaatgtttcataaattttctcttgttttcttctaagggtctcattgatttagcttttgcttggtctttgatccattttgtattaagttttgtatatggtataaagatcctttttgcatgttgatacccagttttccagtatttgctgttgaaaagacttgtcttttcaagacatttgaatggtcttggcactcgtgttgaaaatcaatttgaaaaaaacattctattgatttgtaaatctcttgtaatccagaaccacattattttgattaatgtagctttgtagtaagttttgaaatcaggaagtgtgagtcttccaactttttctttttgaagattgcatagctgtttggtgtcccttgagattccaaatgaattttaggattttttttccccacaaaaaatactgttgggatgccgattatattgaatctgtagatcattttgggtagtgttgtcatcttcacaatatttagagttccaatccatgaacatgcgatgtctttctacttacttatgttttctttaacttcttttagcactgttttgtagttttcagtgaataatctttcacatccttggttaagtatattactaattattttattctttgtgatgctattgtaaattgaattgttttcttaattttcttatcaatgttcattgcaagtgtacagaaatgaaactgattttcatgtattgattttgtatcctgcagctttgatgtattcaagctaacaatttttcgggttttctgcatttacgatcatgtcatctgtgaacagagatagttttacatcttcctttctagtttgaatgtcttttatttctttttcttgcctgattactctggctaaaacttccaatattatgttggctagaataagtgaaagtggacatcattattttgtttctgatcttaaggaaaatgctttcagtctttcaccactgagtattgagtattgtgttacctgtggatttttcatatgtctccattatgttcaagttattcataggttattgagggtttttatcatgggagggtgttgaattttgtaaaatgcattttctatataagtttagatgatcatgtagttcacatccttcattcttcatgttggagtattacattgattatattgaaccatccttgtattctgggagtaaatcacacttggtcacgttgtgtattccttttaagatgctgctgaattcagtttgctagtattgaggatttttttcattgtgattcataaaggatattggtctggttttcttgtatctttttctgcctttgttatcagggtaatgctggctataaggatgaattaggaagtattctcttttctttaaatttctggaagagtttgagaggattggtgttaattcttccttagatgtttcagtagaattcatcagtcaagctatgtggtcttggactttttggttgttgttggaagcttttggttacttattcagtctccttactaattataggtctattgaagttttctatttctttgtcagtttgggtagattgtgtgcttctgtgaatatattcattttatctaggtgatccaactttttggcatatcatttttcattgtattctcataattatttctgtagaatcaatagtaatgtcctcactttaatttctgatcatagtaatttgtgtactctttcttattttcttaatcaatacagctaaaggtttgtcaatattgttgatctttttaaagaactaaaattttgttttgttgatttcctttattttttttttctgttttatttatcaccactcttatttttagtatttccttccttctggtagctttgggtttagtttgttcttaagttccttaggtgtaaagttacgctgttgaaatgagatcttcttatttaatgtatgcatttatagctctaaattttctcttagcactgttttcactgcatgctctaagttttgatatgttgtctctatctcaatgaattttctgattcctttccccatttttcaggagtatgttgcctaatttccacatatcttttagttttccttctgttattgatttttatctcttaagttatttcttctttcagctaaattctgcttttgaaccctcccatgaatttttcattttggttattctttttagctccagagtttctggttggttcttttctcttcgttggtctcattcagtttatacattgttttcctaattttcttctaaagatgattgttttaaagtcttctgttaatgtcactcatctcatctgggtcaccggaattgtcattgagcagtgggcttgctgcccagtgtgcatagaagcaaatattatggcaccagcctttgataaaagaaaaagctttattgcaaggttgactagcaaggagagaggaggcagtgctcgaatctgtctccttaagctagggtctggggacaggttttataggcagagtgactatgaggggagacaggaaaatacaatgaggcatgatctcattgggctgttcaggaggtagtgcagggaccttgacccttaaattaactctgcagcaaaacagggcactccttgcttcttaatttgctctgccctgggttcagttactgaggttctgtaactgaccagagggttcctgttgcctgctgcccagatagagcctatttatcaagacaagggaattgcaatagagacagagtgtaatacacgtagagctggctaaataggagactggagttttactattactcaaattagcctctccataaatttggagcgtagtgtttgtttgttttgagatggagttttgctctgttgcccaggttggagtgccgtggcgcaatcttggcttactgcaacctctgcctcctgggttcaagcgtttctcctgtctcagccttctgaggagctgggaccaggcacgtgccaccatgcccggctaattttttgtatattgttttagtagagatggggtttcactgtgttagccaagatggtcttgatctcctgactttgtgatccgcccacctcagcctcccaaagtgctgggattacagttgtgagccactgcgcctagctgggtagtgtttttttgaaagtagtttggtgggcagggagctagggaatgggtgctgctgattggttcgggatgaaatataggggtgtggaaaatggtcctcatgtgctgagtctgccacaggaccattgaatcatgagtcttggatctgggtggagccatcttgttgtgagaaatgcaaaagtctgaaaagacatttgcaatccgaaaaggccaatcttaggttctacaatagtgatgttacttataggagtaattggggaagttgcaaatcttgtatcctccgaataatggctggtaattgtttaactatacctacatcttagcagaattcatgcctctgtcatccttctaacctggtggatggccttttattagttttacaagtggtttaggtttggggaggctattatcatttaaactgtaaactaaatttctttcaaaattagctcgggccatgcctaggaatgaccaagggcagtttggaggttaaactagaggtaaatttggctcctggatacaccaatcaggcatgctggattaatctgcacatgctcaggctttgtgatttgcaatctgggatgtagattgcagtttgtgattacagaaagcccattgtcagccgggcgcggtggctcatgcctgtaatcccagcactttgggaggccgaggcaggcgtatcacctgaggttgggagttcaagaccagcctgaccaatacggagaaaccccgtccctactaaaaatacagaaattagccagtcgtggtggcacatgcctgtaatcccagctactcgagaggctgaggcaggggaatcacttgaacctgggaggtggtggctgcagtgagccgagatcgcacccttgcactccagcctgggcaacaagagtgaaactccatctcaaaaaaaataaaattaaatttaaaaagtccataagtccattgtctgggcttgtttgtcatcttaattgttcctttgaatgggccattgttttctcttttgttgaaaatcagacatttgactattatgtggtaactctgggaatcagatttctcccttcttctgggtttgttgtttttcgttttatttattgattgattgagtacttgttgaaggctgtagtagtccatttgtcctgagactttccaaacaatttttgcaaagactagtccttgttgtgtgtgattattgaattctgttcctttagtgtgtgttcagcttaagttacagagatttcctcaggagttctcccagtttttgcagttagctctgtgatgggttactctttcatctcttaagtaggcttcttttgaacatagggatcatcttcttaggtattttctgagcatgaatcttgcttggtcatgtacgtgactttctaaattcccctgtatacacaactgcttttgaatattcttttttttttttttttttttgagatggagtcttgctctgttgcccaggctggagtgcagtggcgccatctcggctcactgcaagctccgcctcccaggttcacaccattctcctgcctcagcctcccgagtagctgggactacaggcgcccaccaccatgcccagctaattttttgtatttttagtagagacgcggtttcaccgtgttagccaggatgctctcgatctcttgacctcgtgatccgcctaccttcgcctcccaaagtgctgggattacaggcgtgagccaccacgcccagagcttttgaatattcttatttcccaaagagcctcaccttatcttctctttagggccttacctagtcttttgtattgtcccaggggtctgtgagtctgtagcggccttggaactttaagagcagggcctgctgctctttttcacctgagttttgtgttaggctaaatagaaatgaaagtcttactcaggcctttaggtatcccccagaagggttagaactacaaagctacagaactttcctgctctttgactgttttccagcacttcaacaaagtttgttcaggcagtttctctttgttttttgatgtttctctgtggggaacaaaacctcagagcttcctatttcactattttccttgaacttaataatttataatgtgaaaagcaactgtgttaagtttggctagaactaggtgatataacaaaccctcaagttaagtggcttaacccaataaagtttatttctagtttacctgacagtccagagtgggtatacatgattagtatcagtgaagaggtggtagaggtataggagtgtttgtgtgttggggctgggggacattctgcttcacgtagtctttcagagacagagttgaatgtctttaacatgttgccctggagaaccttagggggaaggggaaagggaaggactgagttggaggctgttatgagctagacttggaagtacaatggtacacctgttttgacttacatgtcttgggctagatctcagtcatacggccatatttaattgaaagagaggctgagaaatgtaaagtagttatatgttataggaagaggatggaactggaaagtgattttggcgaatagctagtaatttaacccatatcaattgcacacagaacttcctcgagcttccatgttctgttgaagcagctgtaagatacacattttatattccattgaggaggaatgaaaagagaaagcattgccaattaaactattacacagtgctttcttagaataaagtattatttctttcaataaatgcaaatataaaactcagtaaatataaaaattattttacatttactcagttttatcatgtatcatctttgaacatacgttgaaagtataagtgaaataaattgattaaattattcctaaaatgtctttgtactcagagcccaattcttttttttttttttttaattatactttaagttctgggatacgtgtgcagaacatgcagttttgttacagaggtatacatgtgccatggtttgctgcacccatcaacccgtcatctacattaggtatttctcctaatgctatctttcccgtagccctcccccacccaccgacaggccctgatgtgtgatgttcccctccctgtgtccacgtgttctcatttttcaacttccacttatgagtgagaacatgtggtggttggttttctgttcctgtgttagtttgccgagattgatggtttccagcttcatccatgtcccggcaaaagagatgaactcattcttttttatggctgcatcatattccatactgtatatgtgccacattttctttatccactctgtcgttgatgggcatttgggttggttccaatattgtgactagtgctgcaataaacctatgtgtgcatgtgtctttatagtagaatgacttataatcctttggtatatacccagtaatgggattgctgggccaaatgatatttctggttctagatccttgaggaatcgccacactgtcttccacaatgtaaaagtcttcctatttctccatgtcctctccagcatctgttgtttcctgactttttaatgatcaccattctaactggcgtgagatagtatctcattgtggttttgatttgcatttctctagtgaccagtgatgatgagctttttttcatatgtatgttggctgcataaatgtcttctttggagaagtgtctgttcatatccttcgccctttttgatggggttgtttctttcttgtaaatttgtttaagttccttgtagattctggatattagccctttgtcagatggatagattgaaataattgtttcccattctgtaggttgtctgttcactctgatgatagttgcttttactgtgcagaagttctttagtttaattagatcccatctgtcaattttggcttttgttgccattgctttttatgttttagttatgaagcctttgcccatgcctatgtcctgaatggtattcttctaggttttattctagggtttttatggttttaggtcttacatttaagtctttaatctatcttgagttaatttctgtataaggtgtaaggaaggggtccagtttcagttttctgcatatggcttgccagttttcccaacactgtttattaaatagggaatcctttccccattgcttgtttagtcaggtttgtcaaagatcagatggctgtagatgtgtggcattatttctgagccctctgttctgtattattggtctatatatctgttttagcaccagtatcatgctgttttggttactgtagccttctagtatagtttgaagtcaggtagtatgatgcctccagctttgttctttttgcttaggattgtcttggctatgcgggctgttttttgattccatatgaaatttaaagtagttttttccaattctgtgaagaaagtcagtggtagcttgatggggatggtattgaatctataaattactttgggtagtatggccattttcacgatactgattcttcctatccatgagcgtggaatgtttttccatttgtttgtgtcctctcttatttccttgagcagtggtttgtagttttccctgaagaggtccttcacatcccttgtaagttgtattcctaggtattttattctctttgtagcagttgtgaatggaagttcactcatgatttggctattattggtgtataggaatgcttgtgatttttgcacattgattttgtattctgagactttgctgaagttgcttatcagctttaggaaatttgggggctgagatgatggggttttctaaatgtacaatcatgtcatctgcaaacagagacaatttgacttcctctcttcctatttgaataccctttatttctttcttttgcgtgattgccctggccagaactttcaatactatgttgaataggagtggtgagagagggcatccttgtcttgtgctggttttcaaaatgcttccagcttttgcccattcagtatgatattggctgtgggtttgtcataaatagctcttactattttgagatacattccatcagtacctagcttattgagagtttttagcatgaagtggtgttaaattttctgtatctattaagataatcatgtggtttttgttgttggttctgtttatgtgatggattatgtttattgatttgcatatgttgaaccagccttgcatcacagggatgaagctaacttgatcgtggtggataagctttttgatatgctgctgaattcggttcgccagtactttattgaggattatcacattgatgttcatcagggatattgcctgaaattttctttttttgttgtgtctctgccaggttttggtatcaggatgatgactgtcctcataaaatgagttagggagagtccctctttttctgttgtttggaatagtttctgaaggaatggtaccagctcctctttgtgactctggtagaattcaattgttaattgtctggtcctgggctttttttggttagtaggctattaattactgcctcagtttctgaacttgttatggtttattcagggatttgacttctttctggtttggtcttgggacagtgtatgtgtctaggaatttctccatttcttctagattttctagtttatttgcatagaggtgtttatagtattctgtgatagtagtttgtatttctgtgggatcactggtgatctcccctttatcatttttattgtctgtttgattcttctctcttttcttctttatttgtctgggtagcgttctatctattttgttagtcttcaaaacaccagctcctggattcattgatgttttgacgggtttttcgtgtctgtatctccttcagttctgctctgatcttagttatttctagtcttctgctagcttttgaatttgtttgctcttgcttctctagttctttgattttagatctttcccactttctcctgtgggcatttagtgctataaatttccctctaaacactgctttagctgtgtcccaggtattttggtatgttgtgtctttgttctcattggtttcaaagaagtcatttatttctgccttaattttgttatttacccagtagtcattcaggagcaggttgtttagtttccatgtagttgtgtggttttgagtgaatttcttaatcctgagtgttagtttgattgcactgtggtctgagagactgcttgttatgatttccattcttttgcatttgctgaggagtgttttactttcaattatgcggtcaattttagaataagtgggatgtggtgctgagaagaatgtatattccgtttatttggggtgtagagttctgtagatgtctattaggtccacttggtccagagctgagttcaagccctgaatatccttgttaattttatgtgttgttgatctgtctaatattgacagtggggtgttaaagtctcccactattactgtgtgggagtctaagtctctttataggtctctaagaacttgctttatgaatctgggtgcacctgtattgggttcatatatatttagcatagttagctcttcttgttgcattgatccctttaccattatgtaatgcccttctttgtcttttttgatctttgttggtttaaagtctgttttatcagagactaggattgcaacccctgttttatttttttgctttccatttgctcgttaaatcttcctccatccttttgagtctatgtgtgtctttgcatgtgagatgggtctcctgaatacagcacactgatgagtcttgactctttatccaatttgccagtctgtgtcttttaatcggggcatttagcctgtttacatttaaggttaatattgttatgtgtaaatttgatcctgtcattatgatggtagctggttattttgcctgttaattgatgcagttgcttcatagtgttgatggtctttacaatttggtatgtttttgcagtggttggtaccggtttttccttttccatatttagtgcttccttcaggagttcttgtaaggcaggcctgatggtgataaagtctctcagcatgtgcttgtctgtaaaggattttatttctccttcacttatgaagcttagtttggctggatatgaaattccaggttgaaaattcttttctttaagaacgttgaatattggcccccactctcttctggcttgtagggtttctgcagagagatctgctgttagtctgatgggcttccctttgtgggtaacctgacctttctctctggctccccttaacattttttcattcattacaaccttggtaaatctgacaattatgtgtcttgggacacataataagagcacctgggggaaggggcggctgtgagtgcagctttagcagaagtaaatattcctgcctgctgactctaaagacagcagtggatctcccagcacagcgctcacgctctgctaagggacagactgcctcctcaagtgggtccctgacccttgtgcctcctgactaggtgacacctcccagcaggggtcgacagacacctcatacaggagagtccttttccaagttgttccattctcccttcactttcaggtacaccaatcaaacgtaggtttggtcttttcacatagtcccatattttttggaggctttgttcattccttttcattctttttttctctcatcttgtcatcactctttatttcattaagttgatcttcaatctctgatatcctttcttccgcttgatcgattcggctattgatacttgtatatgcttcacgaagttctcgtgctgtgtttttcagctccatcaggtcatttctgtttttctctaaactggttattctagttagcaattcctctaaccttttttcaagtttcttagcttccttgcattgggttagagcatgcttctttagcttggaggagtttgttattacccaccttctgaagcctacttctgtcaatttgtcaaactcattctctgtcccattttgttcccttgctgacgaggagttgtgatccttgggaggagaagaggcattctggttttcggaattttcagcctttttgcattggtttttcctcatcttcgtgatgtggacgtcctttttgttgatgttgatgctgttcctttctgtttgttaattttccttctaacagtcaggccccactgctgcaggtcagctggagtttcttggaggtccactgcacacccggtttgcctgggtatcaccagcagaggctgcagaacagcaaagattgctgcctgttccttcctctggaagctttgtcccagaagggcacctgccagatgccagccggagctctcctgtatgaggtgtctgtcgaccccggctgggaggtgtcacctagtcaagaggtaaaagggtcagggacccacttgaggaggcagtctgtcccttagcagagtgtgagggctgtgctgggagatccgctgctctctttagagccagcaggcaggaatgtttacttctgctgaagctgcgctcacagccgccccttcccccaggtactctatcccagggagttgggagttttacctgtaagctcctgactggggctgatgcctttctttcagagatgccctgcccagagaggaggaatctagagaggcagtatggctacagcggctctgcggagctgcagtggactccgcctagtttgaagttcctggcgctttgtttacactgtaaggggaaagctgcctcctcaagcctcagtaatggcagctactctccctccccacccgcccaccaagcttgagcatcccaggtccacttcatactgctgtgctggcagcaagaattacaagccagtggatcttagcttgctggaccccgtgggggtgggatctgctgagctagaccacttggttccctggcttcagccccctttccaggggaatgaacagtacggtcttgctggcgttccaggcgccactggggtatgaaaaaaaactcctgcagctagctcggtgtctgcccaaacagccacccagttttgtgcttgaaacccagggccctggtggtgtaggcaaccaagggaatctgctggtctgcaggttgcgaagaccatgggaaaagcgtagtatccaggctggaatgcaccattcctcatggcacagtccctcatggcttcccttggctagggaagggagttctccgaccccttgtgctttctgggtgaggtgatgccccaccctgcttctgctcgccctccctctgtcaaccagtcccagtgagatgagccaggtacctcagttggaaatgcagaaatcaaccgtcattgatctcgctgggggctgcagaccggagctgttcctattcggctgtcttgctccagagcccaattcttctcaatcatttttttcttacccagagttgtctgtttttccacagagtatcttttctgtgcagttaggaaagttgatgatatagcatacttcatccactgtactttgatctgggattttcttcttaaccattgatactggtttctgtaagtgttaatgctggcactttcttcatgttaccggatgatgttaatgaaaggttttcagacagttgctagctcatattctttcttcaactgttcgttaaatggattgttgcctggaatgttgagaggttgcaattgtccagttatatcactggaaaaaacaactaagttcttatacaggcagagagaactgtcattgtcaccacctcttcagtagcaactataaatgtctttaattgtaagccatctgccaatttcagagaagttaacatgttaggggaaaaaacgcatcatagaattgaacatatatagtatgttgaatttgttttgaaattcaggtttttgtgtcttgtaatatttgaggctttcctccttcccccatcatgcctagcctagtcaaaatactttttattgaatttattaaaataattacagtttatcatgatccatagtttagaaaaagaaaggatatgggggcaagatgggtaacttcagtgactttaagggctgaaagcaacaatttggagcatcgtgtcaaagttgtgggaatctgattttagaacaatataagaaaaaatttaaaaaattttaattacttctgaatgaagtggactctgacagtgaatttgctgtcattgaaagtattcagagaggttctagatacaaatcacccagacacagtaaaagcaatttcttcactgggtggtaattgaagaatatgttgtttaatgtgtttttctgactattgatattcctattctaaaataatttacctttgtactaagtggccttctcttttcagatactcaacaatgtaatttatcgatactttctgttattgattggaacaccattgagtttctttcttaatgtaagacaggcaactaaatgcaaattactgttctgtttctaattaagtgatgaaatacactaagccaggtcattctttgaaacactgattgacacagtgggaggagggagctaagaaatagtactttttttccttgcagattttacttgcaaagtattgtaacctgattttccttcaggtcacctagattggagtacagtgatgcgatcttagctcactgcagcctccaactccagggcttaaaccatccttccactcctagctcagcctctggagtagctaggactacggaaacttgctaccacttgtggctatttttttattttttgtagagacaggatcttgctatgatgcccaggctggtctcaaatgcctaggctcaaaccatccatctgcttcagcctcccagtgtgctggggttataggcatgagttactgtgcccagcctatactcttctaatttttgattctttcagggtttagttggtgaaagagccattatgaattttattttttaatttaatttctttttttttgagatggagtcttgtggtgatgcccaggctgacgtgcagtggcgtgatttcggctagctgcaacctctgcctcccgggttcaagcgattctcctgacttagccccactgagtagctaggactacaggcacacaccaccatgaccagctaatttttgtatttttagcagagacagagttttccagtgttggccaggctggtctcgaactcctgacctcagaggatctgcctgccttggcctcccaaagtgctgggattacaggtatgagccagaattttatttttaatcaaaaaaaggttttaaggaaatggctcaccttccttccctccctccctccctccaaaggacttgtggtcagactctttggaattgccagtacttaatcagctgaatgaagaattttctgatctttctgtttagtagttcaaatggtcattaccaggattctttgtatacttttggggagcaaattaaatagatgaaagacagccaacttttaggatgagagataggcatagatatatcgttttcttatcttcttccacatactcaaatttagatatcaggttatccatgatttgctttttagttcaccagacatagtgaagttaacactcctaatttagttttggctatatataacttgctaacagctctagcctgggattttaaagacagcttaactatgttcatggaatgctatgactggctaaatatgactctttaatgtttcataaaacatgtctttttcctaaatagggttgtaacattctcttaaatatttcatgcatgtctttctctctctgtgagacagatctctctagatttctctggttttatttctgacatgctatatgaagtactttttatttaaaagtaagtacaatatgtagtatctcagtgtgcatatggcttggatgcttactttgacgatgaaaaattgcttaaatatgctgacatctgaattgtatctgtaaattaatgttagcaacttgagactcagtaattgtttcttaaaatggattctaattagttacaagtaaaaagtaactttcccttaaatgttggttgtattaattacaaatactttaaaaagatatattaaaatgataaatctaatttttttcctggacattgatttatgttgtgtgatgacataacagtactggaaatcagtagaggtgacactgctgtacatttgtagctatttatattttgttgtatttttataaaacaaagaaatacatcagatcatagtcattataaagcattaaaaagatatgaaaacatacagttaaaaaatgatagcttctccttccctaaacacccaattcctaatgaataaatactgttaaaaattaggtgattatcttcccacactttatgcatttttagtttatttaatgcaccattgtgtcagacattgttctaaggattaacaaatagaagagagtttatatgaagaggcaaaaacactatgaagtaaataataatattgggaattgaggcctagagaggttaactaattgtatggttaacctagacagtctggcattaagatctgtgctcttagtcatgttgcgtcttatgcttttacaaatatactattaatatatgtactcatatatagtattttgttagcttttagtgtaaaaatttattattgtacatggtgctttgaggcttgtttttttctcacttaaaactattttttgatgatctcattattttttaaatggctgtgtatgttttactataacttatttaaatttatttactataaattattttgtctttaatgaactattagtttttttccaaaattgcaagcaaggttgcagtgaatatgtttgttacccttgtgtgtatgtgtgaggattttttgtgagattcctacaaatgatgttgggtctgaggcagtgcatatttaacacttaagtaaaacttccaaatgacccttcaaaatggccgaaaaggtttatacccacatcagttttatatgagtacctgttttctcataactttgccaacaaaaggtacaaataatccctgaaatatttgccagtggggggtaaagactagtaacgccttgctgttactatttgcatttcttaacattttttatttcttagccatctgaattttttgggtcaattacctgttcataacctttgcccatttttttctattgcattgcctgtttttgtattttaactttgtaaatgttaacagtatttttaagtttgttgttgagcactatataagttggctgtggaaccactatagtgattgagaatgcagacttgcaccagacaggctaaattctagctctgccacttctttgggaatatgcctaatctttgtacatcagtttcttcattggtaaagtgggattagtggtggtacacctcaagagattattgtgaggattaaataaattattaattacaaacagcatataactttctgatctttagtaagtgctagcttttataattattattgctctaatgatttatgctatcttgttattagcacaattttcaatttttagtcacctgttttaaaaaactgtctttttactaaattaagactctcttcattctaatatttataagaagaaagtagagtttaaatttcttcagaagcttggtttttcttttttttttttttttaacttttggtatattttctatatggaatttctttttgtgtggtaggcggtaagttgtcttagtttttttccccccagatatctatctagttatcttcactgattaaaaattctgtgttagtcatgtattaaagttttcatgtatgtagaaatctttttctagattctttatttcattattccccttgcgatctgtttattaactcttgtgtcagtatgccactgttacagttacaatagtttctttatatattttgataattttggaaaaatcccctctcatccttctgttttagatttgtcatagctgttttgatacacttttccagactgattgtagattctattctattcatagaatattcatagcattctattcatagaatattcatagcattctattcatattctattaaaacatcctgttgggttttgaaagggctaatatctttacagtgttgagtgttcttatgcaaggatatatctttcccaaaaaattaatgaacgtgatacatgcacatggagaaagaatcaaacagtacagaagagcataaaatgaaatacaagtctttctttcaagctcacaccccaaatccataaccaccattagtattcatgtatggatgtgtatgtgcttcatggccttattcaatcaagcaccctagtcttgatttactgctatattccagaaaacctttcaatttatataaatgtgtgtgtagaatttacctttccttttatcacacagaatgatgctctagtattcttcactcttttgtatcttttacttttttccactttgtaatgtatcatggaaatcctttcataagaaattctattgatctacctcacctatttttattttatttatttatttatttatttatttgagatggagtctcgctctgtcgcccaggctggagtgcagtggcgctatcttggctcactgcaagctccgcctccagggttcacgccattctcctgcctcagcctcccgactagttgggactacaggcgcccgccaccacaccaggctaatttctttttgtatttttagtagagacggggtttcaccatgttagccaggatggctacgatctcctgaccttgtgatccgcccgcctcagcctcccaaagtgctgggattacaggcgtgagccaccgcgtccagcccctacttcacctatttttaaaggcttcattgtctgtcattgtatggaagtactgtggttttatttaatcaccccctattcataagcattttgattataataattttcattttgctagtgtaactaatacagtatgttcttagagatttatttttgtattcttgtgtttatgtctgtaagaataatttccagccatggaattgctagggtatgcaatttcaaattgacagacgtttttagtttccactttaaaaatgttgaaccaacgttatattcccacttttagtgtatgcaaatgcatatttctcagcaccaacactggattatatcaactgcattatttttgccagtatgaatgttttgctatttttaaaatcatgagtgagattaaacctgttttaacattcgtcagccgtttattataacaaataacatttattgagcacttacatgggctaggcactgttctaagtgggttgcatattcatttaatgaattgtttcctcacatcatttgctcatttaaaaaaatgttttttcttagtgaactaagagttcattgtacattaagaaaattacctttaatcatatgtattgcagattttttccattttacttattgtcttgatgtgtatgtatacattttatacacagttttacatttttatgtgcttagattatgttttatgatttttttcttcttggtcttaatcggttttggttaagcttattgcttaaccatgaatatgatcatttttaccatataatttcctaattggttattgctcagttataggtaagtgttgattttcaaatactggtgttgaactctgttattcatcagtcttttaaggcatactcttggactttataggtagatgataaaagcttctgcaagtatttttatagctttgtacttgctatttctctttcttttcctttgcattagctaaggtcaccagtacagtgttaaacaatagtgctcatagcaggcattcttgccttgactttaatgcattttgttattcagtgagatttattcatgtattaattaatatgatagtaattttactgtttaggagcacttattttcagggaaagtagcctactaattagacattaacaagaaggtaaagatacctaacttttatatcagtatgtggtcttgtgcaaacagtgtattctcaactctcccatttatatagtgaggataattattaatctgtaatgtaaaattcctgtaaatgactaagcaatatgtaaaatatcagagcccacatattaaagtatcatcatatgacaggttgccatttgttgagttattttcaagtgcttacggatattttacactggggcatgacttctgagttcgtggaaaattttttgttctgaatttttcagaatggctgatctgaataataacgtatatggttcatcagcataatatgagtaaagcctattcaaacctttacatttctttcctgtcggttcccaaaattattcagagaaatggaggggtaaagtagtatagataaacaaaattgttcatcaccagcccatgtttgaaatataccattaagatagacagcggctgggcgcggtggctgacgcctgtaatcccaacactttgggaggccaaggcgggcggatcacgaggtcaggagattgagaccatcctggctaacatggtgaaaccccgtctctactaaaaatacaaaaaattagccaggcgtggtggcgggtgcctgtagtcccagctagtctggaggctgaggcaggagaatggcgtgaatccaggaggtggagcttgcagtgagcctagatggcgccactgcactccagcctgggtgacagagcgagactccgtctcaaaaaaaaaaaaaagctagcagacagcagttattcaataatgaataagacacgatttctgcctttttgaattgtatatgaggttaagtagcctttacttgtcttcccaagtgagatttactgaaactaacattttagtagtctcccattcctagcacaatgcctggaatctgttgggttctcagtacatttttgcttagtgtacttgaacttcagtgtttatgaaacatagattcctgcatattctggttcagtaggtattaattaggacccaggagtctgcactgttaacaagcacctcagggtgttttccggtggtttctcttaataaatacaaagaaaattttctgaagagagatgttatattcatctcatagaaaatcaattttgggtgggaggaagtttcactgtaatcttcatgccttatacaaaggtaactttgccttttacttcagacttcagcttttcatttaagaggaatctgtatatttagcacagtcgtgggttgttggtatccacttagtaaatatctattgattaccttatttttccctgctctgtcatccaggctagagtgccctgccgcaatcttggctcactgccacctctgcctcccaggctcaagcgattctcccacctcagcctcccgagtagctgggaccactggtgtgcaccaccacgcctagccacttttgtgttttttgtagagacggggttttgccatgtttcccagaccatgttgattattcagcattgattacttgcagtaattatggaattagtttttaatttactaatccagcgttttgtggtaaagttacaattttaaatgtagtttaaaaataaaacgtttttaaactggtctctgtttttcctccttgggaccttgtcatagcttaggtggagcttgaaataatgaagcgtgtcagatgtggcataacatggttttttaatgaccaaaatgtaacttttattttaaagggtattatatacctggttatattgaaaggtagccttgagatgtataagagccttctttgtattgttacacactcttccaaaatatggacaaatcataaatgatgaaaacatgattgcaattttgtagaatttactagttttggcatcattaatttggccaaaatacatgtaataatgggaatttaatgcattataggtttctataaaaattctacaattatagaaatatttttacagtgtcctattcagtaattaataaagccttctttcatgcaattataaatgaataccaatgtcctattcagtaattagtaaaggcttctttcatgcagttataaacagataccaatattttgtattggtggacgtgaaaatatttatttggtaatcttagtaagggatgcatattttttgattgaagactatgcatttacccagctcaaaggaatggatattttatttttgaatttaactcagtgatgtcgctaatctatgtgaacacgccaactgtgtgtgtgttggtggggggggtagttagtaaccatggagctaaggattgatgaaggttggtgataaagggaaacattcccttggaattaagacattgttccttgctgggtgcagtggctcatgcctgttactccagcaccttgggaggaggctgaggcgggtggatggtttgagcccagaatttccacaccagcctgtgcaatgtggtctctacaaaaaaaaaccccaagaaaattagcccagcatggtggtgcgagcctgtagcctcggctactcaggaggttgaggtgggcggattgaggccagaagcgggaggcagcagtgagcttgtgagggtacgggggcgagataactgtctcaattaaaaaacaaacaaacaaaaaccaggcgcagtggctcacgcctattatcccagcactttgggaggccgaggcagtggatcacttcacgtcaggagtttgagaccagcctggccaatatggtgaaaccccgtctctactaaaaatacaaaaattatctgggtgtggtggtgggtgctagtagtcccagctactcaggaggctgaggcaggagaattgcttgaacccaggaggcagaggttgcagtgagccgagatcgtgccactgcactccagcctgggccacagagtgagagactccgtctcaaaaaaaaaaaaagattctgtgtattagacacataaagcacttgtgtgccaggtatagttgtgttttacaaatattgacttatttaatgactacaataactccatgaagtaagtacaattattatttctttttacaaatcaggaaactgaggcacagagaagttagagaacttgcccaacgtcatactgctgttgagtggcaaagttgggatttgaacccagaccttctatcctcttcacctttgttaatgctgccttttgtttcctgaaagcattgctggtgtgtttatgcgttatgtctttactactaattatatttgatttttggaaagatgtggtattttatgctgtgcattatgtcgtttttgtggtttataattcataatgccatgatgtttttaatttaacaaacaagtattagaaaaggtaaagttgttgtatataataactttgctaataatcactgaacgttgtctcagcaagtatatgtgtaatgaatataaatttataccattaaaaaaaagtagccattcattcattcacattttcttgtaattctgcttgtttccatatttgcacttaagatctgttgaacgttaaaacaaatttgcttccttagattttttaaccagtcaccatttttttaagttggtaggatgggccatattgaagataaactatattttacaaattttatcagcatgctctatgaacttgcttctcaaactggagtattaacatatgtatgtgtttttaccagggtgtttgtgaagctacacataaaagtattactcttttaaagtaccatttctagttctaaagattggtgagggtggaaatattaagtactttaaattttcagcttttaaaaattttttatgttgaaactaaatgatttttaagaagcaaagaatttcacataaattatggttgaccatcctagagaccatgaaggttgtattaattcattccatggaaaacttttaggagtacttgattatatttgaagtaaattggtatcttggaaagttgtgaaattggtgaacctgccataccaaaatggtaaacaaaaacaaaactttcctggggtactgaaaagaatgatgttaccaaaggcacgtcttgttttaaatcttatgttttatttttttctttaatcttaacaaaccccacttttaaataaatccttagtaaaattaggatttatttggggctgttaatttacaaaaggattgattgtgatattcctttaaatagcttgcttcttcagtttacaaatgttcattatattcataatgttcaggcctgcatataaataaagcagggaaaaccggtgatagatacttagttttttaactataaaacatcctggtaaaaacattaaaaggttgtaaattggggaacctgtatagccagtgtgttttttaggttggcatatataagtgatattgatataattgtcttttgtttcattctaaatactgagcttagggcttgaatttgccatctgtttttttttttttattaagtatgaccattaaaacaggaataatttgattgaagactacgcatttacccagctcaaagaaatggatattttatttttgaatttaactcagtgatgtcgctaatctatgtgaacattgtagagtgacataaatgtcttctttagagtatccagatggaaattgtggcacaatgcttttgtatttcagtgacttcagaaagaaggtaggcctttaggagagtatctggggaacctttcaatagggtaattgtggggatagcaaattaagtacagtcgtgtgttgccaacaacagggatatattctgagaaatgtgtagttaggtgatttagtcattgtgtgaacatgatagtgtgtatttaccacaaactgagatggtatagctacctatcacacacctaggctatatggttatatatagcatagcctattagtcccaggctacgaaagtatacagcatgttactgtactgaatactgtaagcagttgtaacacaatagtatttgtgtatctaaacatagaaaaagtacagtaaaaatagagtgtaaaagaaaaaaggtataatttttttagcttaatctgttcttttaaaaattatatttcaataagtttttggggaagaggtattgtttggttacatgaataagttctttagtagtgatttctgagtttttggtgtacccattacctgagcagtgtacactgtacccaatgtataatcttttatccctcacccccatcccacccaaatatggtatacttgtttagggcagttagcttgcaggactgaaagttgctctaagtgagtgagtggtgagtgaatgtgaagtcctgggacattactatatgactttataaccactgcacttaggctacactaaagttgtaaaaaagttaagtgattgtgctatgacattatgacagctacagcatcattaggcagtaggaatttttcagcttcgttatgacattatggaaccactgttgcatatatggcctgttattaattgaaatgttgtgtggcacatgattgtagtgggcatgctattctggagtttattttctttgtggaatttgccatctaatagcagagataagtataaaacattttcttttagtagaaagttaagttagaaggagtatactttgttcttttggtttgagtgccatttagacttgagtgaagaagaaaaatagttggtagaattcgcatagttctcaggtttcagattcatagtctgagtttcctgatttgtcactaaatttgtttctcatccaaacatttttaatttacctcatctgtaaaactatgtagattgcaaatttttataatgtagctaattacttttataaaagagaatatttaaaacaaattgtgcatgatagaggaatttgtatcttgaagtttcttgtgctttaagtaggagatgaaccagaagtatgaattaaattgttggagagttttttgatttttctttttgcttgataaacaggaaattctggatatgtgatagtaaatgtttgaggctcctctaaggaagtgctccatcaattttctgtccttgctattttggaggggaaatttttcattttgaggacataatttctatgatatgataaatactaagaatttttcaaaaaataaggcaaatatgatagcaatgagtccagattgcagtgggaaagaaatataggaataagaaatacttctgtaacagctctggaaaacaggaaaagatgaaatcataaaccagaaaattttgaggctttctagaaagatgtaaggctgacaagattagattcctgaaaaccattagtattgaacagcttgtactacacataggggaaagtatctggtttctgagtagaaaagtagacttgcttacaaattcacctagcttagagatgtcagggctagggcagagaaatggctctgtgagcagtatcaaggtaattagaagactctggaattgatgagtcttgaagaaaaatctgtctgttcctctctcttctttaccacactaagagcagagtctgctcacaaaatccaatagccttccattatggggttgatggagatgggggagactcttgagggaagtaaagcagtgattttcaccagccatcagtacagaacaatccggatttaaaaagatgaagacaatgaggaaacactggatattagaggaaaaattaacagtgtaaaagaaaggactggtactgaaacaagcaaagcaaatagctcagagataatagtttatatagaaaataagaaactgaactttttagtattgggaagatacagtattgagaaaggaaccatgaacaaaaaattcttgacaattaaaaatatgattgccaagaagtcaaaaaatagagaaggttgtagaatccagagtactaagttgattccacagctgctctctgaacatttgttgacctagaggcttgcagttaaaggtcacatggattttaggagagagatctttgggccttcaatcattagattgaagagttagaaccctgcagtggaaaaaacacactcaaagtgctttttcctatgttcatactcaccaattaacacagaagactcctgtgacctcaaaatatgtaggatttcttcccaccagtgagtgagcagtcagttctgcagacaccagctagtgtcctccaattcaattcttttcttctttttgagacagagtctcacgctgtcgcccgggctagagtacagtggtgcgatctcagctcactgcaacctgcaacctccgcctcctgggtttaagctattctgccttagcttcagtagctgggaatacaagtacgtgccatcatgtccagttaatttttgtatttttagtagagatggggtttcaccgtgttggccagactggtcttgaactcctgacctcaagtgatctgcccgccttggcctcccaaagtgttgagattatacgtgtgcgccaccgcgtgtggctcctccaattcagttctcacactatctacctgaagacagcatcaaagcccagaagttgagggttcagtctcacaaaactgcccattactcctgataccagttgcaaacccaggtggtgggtttttttttttttttattgagacatgatcttgctctgtcacccaggctggagtgcagtggtgtgaacacagctcaccacagcctcgaccttctgagctcatatgagcctcctgcttcagtctcccaagtagctgggactgcaggttcacatcaccatgcctggctaatttttaaatttttttgtagagatggggtcttactatgttgcctgggctggtctcaaactcttgggctcaagcagtcctcccaccttggccttccaaagtgctgggattacaggtgagagccactgcttctggctcccctgggttgttttacctgtgcttctgacggaccaactataaatcagggatctcacaccctttccttggtttcagttaagctgctgaagtggcttacagaacacagggatacacatttaccagtttattataaaggacattacaaaggatatagctaaagagatggatagggcaaggtataggaaggggcatagagcttctctgccttctctgagtgtgccaccctagaggaacctttatgtgttcagctatctggaagctctcagaagcctgtcctattgctacttttatggagacttcattggataggtgtgattgaagaactgtgtagaaatgtgattggacaaaaaggttatgagctaatacttatagactgagtgggaaaacctagaaaggccggttcagattcttagcctctctgtgcactgttaatttctccagggtatgggagaacctcttctgaaatgggtgtcttattacctgcagtcagacaacgtaggtcagagaatttctttatgggcagcttcaagatggaaaggcaggggaaaattcctgccttggggagaaaaaggatcatgtgaaaggagggaaagagaaggtcagagacattaccttctgaggcctacttctgaaggccaatgtataacaaggactgtcagtgttatgaaccaggatccatgggcgaaaacctgtgtcatctatctttcacacctgcataaagccaggattcttcacgataaggcttcagtgaaagggagcctagaaaattaaatttactttccacgagaaagacactgtgtcctgaattggtgggttcttggtctcactgacttcaagaatgaagccacagaccctcgcggtgagtgttacagttcttaaaggcagtgtgtccagagtttgttccttctgatgttcgcatgtgttcagagttttttccttctggtgggttcgtggtctcactggctcaggagtgaagctgcagactttcgcggtgagtgttacagctcttaaggcggtgcgtgtggagttgtttgttcctcctggtgggttcgtggtctcgctggcttcaggagtggagctgcagaccttcgcggtgagtgttacagcttataaaggcagtgtggacccaaagagagagcagcagcaagatttattgcaaagagcgaaagaacaaagcttccacagtgtggaaggggacctgagcgggttgccactgctggcgtggcagcctgcttttattctcttatttggccccacccacatcctgctgattggttggtccattttacagagagctgattggtgtgttttacagagagctgattggtccgttttgacagggtgctgattggtgtgtttacaatccctgagctagacccaaaagttctccacgtccccactagattagctagatacagagtgttgactggtgtatttacaaaccctgagctagatacagagtgctgattggtgtgtttacaatcccttagctagacataaagattcttcaagtcaccaccagactcaggagccccgctggcttcacccagtggatcccgcactggggctgcaggtggagctgcctgccacttctgtgctgtgtgcttgcactcctcagcccttgggcggtcgatgggactgggtgccgtagagcagggagtggcgctcggggaggctcgggccacgcaggagcccatggcagtggaggggaggctcaggcatggtgggctgcaggtcccaagccctgccccacagggaggcagctaaggcccggcgagaaattgagcacagcagctggtggcccaggtgctaagcccttcactgcctggggcttgcgggccggcttgccgctccgagtgcggggcccgaggagcccacgcccacctggaacttcggctggcctgcaagcgctgcacgtagccccggttcccgcctgcgcctctccctccacacctccctgcaagctgagggagccggctccggccttggccagcccagaaaggggctcccacagtgcagcggtgggctgaagggcccctcaagcgcagccagagtgggcaccaacgtcgaggaggcgccgagagcaagcgagggctgccagggctgccagcatgctgtcacctttcaacatcagagacgttttcttctcttgggcttttggtgtgggactgaaaagtttccactaaaaacttgtgaccattagcctgccttcataagggtatgggattgtaatttatactacctgcatagtttaggaaactgcagacagaaaattatttaaaagcaatcaaataaatgttggcagtgctacaaagtacctaacagaaaagtgaattatcttcagagggatgctccttcaggtatgcccattgatagagtctaaatgaagtgctttcatattaaaaaaatatgagaaactcagcaatcatgagcaacagtgagcaggaaagacaaatagcagaattagacccctgtgaatgtcagatattgaaattactaggtaagacaatggagtataaatgaataaaatgtttcaaaagaattaaaagggaggggggaattaaaaacatgagcagggagcaaaatactgttaagaaataccaggtagatctgaaaaagaatctaaagcagttgtagaaattaaagatataataatgaccttgaaaaatattaaatgggttaagtagattgaactcagctgaacagagaattaattaacttgaagacagatttgaagaaagcccagatacggaaacatgaagatgtttagagtcagaagaataaacgtctaatgtgtatgaaattgaaatttcagaaaaggataatgaaaagactcacagttggtgtccaaagaaagaatgagaaattcccaaaattaaagtgtgaatcattaaactgaagaagtacgattaatgcagaggaaaaaaagtaactggataatactgaaaactaagagaaccttttttagcagccagaaacagattatctacaaagctatagaaattagactggcagcagacctctaaactataacaatgaatggtagagatcatagagctaggttttcaaatgctaagaaaaacaaatgtcatcctagggagagtaactggcagaatcattcagaaacaaggattttgaaatagatttttcagacagcatcagattgataaaaatctgacagtattgtgttggtgagtatgtggaacaatgggaactcttagacagctggtagaattataaacaactgcttttgagagtaattcagtaatgtctagtaagtttcagtatgcctttctccagtaacccaggaattctacctatgcatacatatatatcttagcattgtttattgatctcttttgaccatgatataactgagatcaaattttcgggaaacaaaatttatccttcctacaggcagtacattgtgatctgtctctgtacgtcatcactttgttcatcttcctttttcccctttactcccaagcattctcttttatttatttatttatttatttatttatttatttatttattaagctgtttgtgatcctggctcactaatgtgatattattgatgggttacaaactgcagtttgaaaaacactgccttaaagaaacaaacagaataaggatagggatattcatagcaatattgtgtgtgagagtgaaaaacttgaagtcatcttaagctctaacaaatggaaaatgggtaaataaactgtggtatatctatctaaggatcttgaactagacatcataataaatcattgaattacaatgcctatattaaatgaatacccttacaaatatagagtatagaaaacaaattacagatgagtatataatgtgatactcacatgaagcttaaaaaatgcaaagcaatggtatatatagttttatgagtatatacatatataaaaacaaagaaatccatggaaatgggctgggcgcggtggctcatgcctgtaatcctagcactttgggaggccgaggtaggcggatcacaaggtcaggagttcgagaccagtctgaccagcatggtgaaactccgtctctactaaaaaaacccaaatatacaaaaattagccgggcatggtggcatgtgcctgtaatcctagctatttgggaggctgagtcaggagaattgcttgaacctgagaggtggaggttgcagtgagccgagattgcgccactgcactccagcctgagcaacagagcgagactccgtctcaaaaaaaaaaaaaaaaaaaaatccatggaaatgataaacaccaaacttaggttattcctgggagtgaaaaagaaaggtatttctgttatccagataatttttttttccttaagctgggtagtggacataaaggtatttattaaataatatcttgtactcatgtgtatatctaaaatatttgacagtaaatttgtttgaaatggaggtggcagtattgacaaattgaaatttctcagaaagtacagcagaaagagttgaacattatgagagaaaagtttgagacctgtataatagatgtgggatatcagtatgtgtgaaataggaattccagaaataaaaaatacagtgcatgtagcagaagcagtagatagtaaaatggtagaataaatttgttctgagctgaaaaaagctttaaaataaaacctatgaaatcaagtttttggtaaaatcaaatatttataaaacttcaaaatttcaagtatcaaaagaaaatgaagttcccagataaacagcaggcgtacccctaacaaagaatctgattggcatttgatttttttttcttttaatgctgcactggatactaaggaagagtagaaacattcctatagaattctgaggtagaagtattgttaacgaacaccatggattttcatctaggtcctgctgctcactgcacagaaagccagtcagagataatgattattgccaaagaagaaggctttaatctcatgctgcagctgaggagatggaagatcagactcagatccatctccctgatggactgaaactagaggtttatatagcagggaagaaatgtaacaatatgcaagaaaacagtaactagaggggcaaggaagcaatcatgatgaatgaggagtccgctctctatctcattgtctggttgttgggatctggtgagtttcagttatttgatagtttttttgggaggcctgaaagtcatttccttaggaaggaactcagataaaacaaaaatgagtttcaagctttaagaccagaaggatcaatttctatgtttattaaaaaagacataaaaacccaaaaaactatctatgggactattgggtcagtttcagtattacgaccctaaagttctatgtgcaataaaactattccttcacgataaaggcaaaatatattctttccgaaggactgtgagcctataataattacatatttaaataaataaatatagtatttgggagtacttaagcaaaatgaaatgaattggaatggagaattttctggaccaaaaaaagaaaggtttatgttaaacatttgtgaacaaaaacaaaccaaaacccagtcagtgacatttaaggttaaatacaaagaattactaataatgtactttgaagtgtaatataatttttgagaaaatattcctgatataatgaatggaacttaggaaagaaatgacagctgagaaataaaattctaggtgacttaatacaagctgtcctacagcaagtgggagtggagcaaggaggggaaagtaaaagaatactgtctattcatggtatactatgcaaagagcttctatgcacaggaatggatggatattttatacttcttgatgtttatgacaaaatacaggctgaaatacgtgttgaaaatttgaggagacttttaaaagaaggccaacaatcaactcacccaaacttcctcaaacctgtttgacagaactaaaaatatatttaataaaaaaaaaaaaaaacaaaaaaacaaaaaagcctataacagcattaggtattaagaagggtgacattggtgcagcaaacttgggggaattccctgatgatagaaagtagatggactgagaggggcagaagaacaagaacagagaaaaccgcaactgaaagtgaaaagctcctgaggttcagtggacctcaaggaactctatttgtgttaccagtttgaaagaactggagtggaggggaggtggtgatgtgataatcagagtaattaattaaaaaactgcctctaggctgggcgaggtggctcacgcttataatcccagcactttgggaggccgaggtggacagatcacctgaggtcaggagttcaagaccagcctggccaacgtggtgaaaccctgtctctactaaaaaaaaaaaaaaaaatacaaaaattacgtgggcttggtggcgggcacctgtaatcccagctactaaggaggctgaggcaggaaaatcgcttgaacccaggaggcagaggttacagtgagccgagactgtgccattattgtactccagcctgggtgacaagaacaagactgtctcaaaaacaaaacaaaacaactaaactaaacaaacaaaaaacaaaaacaaggctggtgcggtggctcacgcctgtaatcccagctctttgggaggccgaggcaggcagatcacctgagttcaggagtttgagtccagcctggccaacactgcaaaactctgtctctactaaaaatacaaaaattagctgggcgtggtggcaggtccctataatcccagctactcaggaggcagaggcaggagaatcgcttcaacccgggaggcacggaggttgcagtgagccgagatcgcaccattgcactccagcctgggcaacaagagtgaaactcccatctcaaaaaaaaaaaaaaaaagctccaaactgcctgtagtagctggatacttcccttcctcgcttcctcattcatactgaatgatcagcagcagggtatttttctcaaggatagagtcatggcttctattctgcatatgatgattctggagaaggcttctggttgggattggaaagagcctgagaactctatcaagaactcatatgggaagaaggaaaggaaagatggctctgtatgtgtgtaatacatgaaacactctatcccaaaagtaaagccttccttattttggcagtcttgggggttccagcctataatctgctttgcaagcacacacactaaaacatgctgcttgatatgttttgcccgcattgagcctgaaatctgctctcccattcagggaagatggcttcagagacggacagacgtgtagatctataggagaaacccaggccagttagatagttctggaacactattcacaaatttggccaaggagcaccagaaaaccaacagtgcaaaacagaaagtgaacgaaggaaaaaactgacccctggaaagtgggaatggtgcaacaaatacatagaacttaaatataataacctcagagagatttcagagggcaaggtagctaaaaattcaaatcaggccattgtgaaagaagcaataggtgaagttctcagaaacgaaaaatctgattgttaaagaataatcaaaggaaggactgaaaattgaaacagtgatttagaaataaagttgaagaaacatactggaagctaaagataaaaagatggagataaaaaatatgaacaagtgtttaagtgacatggggcacggaaccaggtcttcagaggagacaggaggaggggagaaaagacgtaactaagtacaatacctaatgccgtggcgtattagataaatatttaaaaagatgagtgagattgaaatatacttgtgaaaagatggtcaagatatattaagtgaagaaggaagttgtgagaacagtatgcatagtatggtatttgtggttaaaatctatatgcatgttcaaatgtgtacaagaaagagtgaaaggatatgaaacactaataatggttaccttttgaggaaaggatggaggaatgagagaggaattcttttaaaatacataatgttgttttgaaaggaacatttttatttaaaaaatgaaagaactacaagttacattggagaggaagggaggagagcaacatgagggtagaagtggttacctaaataagccatttaaatttacacataatctccaacctatacttttctttataacatgtacttttctgttacttcttagcagttgtctccttcccctattattcctggacgtttacagaagtatattttcacacacttctctgaaccttcccttttacccaaagtatggtgggggtgagggtgtgactgataatttccttattgcacatagattttgtgagagatgatatagatggggagaatcacgtaaagtaaggatatctttaaattctaggtattggtttactaataatagtatcaacccatcatcttttttggaatgagtcagcatataaataaaataatgaatggtaaagagaaaaaacaaagagaattataaattcaaaaggtatatcctggtgggtatttttgagttgagattaggaattgattagtatcagaatagtaacatgtaagtataatcacagaggtttgtagtggtattctggaccacttgaaaggcccatcctttttgtgaggagatggatatgatccttggtttcaatatgccacatctactataaacttctgaaccctccaccatcattcaggatgcatctctcatggttgaagaagtggtggaggatggcatgggaaagagtgcctgaggatccttgcctggaacaagttatggaaagaaagtcttacaggtattcttcttacatattttacttgattgctatgtttttatgggacaaaatagttctctttcttggaagagtgggttgggagggggagagaagaggaagatgggtgtgttggggtagagcagtggccttcttttccaagggtggtagagaaattaggaaagaatattagtgtctttctgtcttttttctttttctgttcccgtacaacttttctgtcatcttcataactaagttgtatcagagttttcgaattgcagactcatttacatgataatatgattcatcaggaacatttaggtacacagcatgctgacataatagtattagctatcaataactcttagaaaccaatgggaaatgtttagatctgtgaattgtactaaattttaaatattttgaatatttttaatacaaatcttatttgtaactaacttgttgatgatctcttctttggttatgttaattggctatttaaccatttcacactctgatttatttctcaggcatgaagatgttaacaatgctgtgcgttttaattaagtagttaattaactggagctccctaagtcttaagttcctgatttttctctagaataccagaaacttaagtgccaagagctcagagaatggcttccaggacagctctagcctcactgcagcttaaaaaattgcaaacagatttttttttttgcaaaccatatgtcagggaatttctcagaggttttctaagaaattcttttatttgaagttttagaaacactatcttcagttgtattgctgataattcataattctgttgtcctttttaaatgataatataaaaagtatgcattagtatgtggggaagttgtttttgaaaacttacagcagttggaacttactcctgtaacaactctgttaagtggaagtaaacaaagataagtgagcataaaattggtcaaggtaaagtaagtgaaatgaaaccatataatagtagagtttttttttttcttttctgtttcagtgaaaataagtaatgttgctcttaagagagaattttgtattattttctcctcttcttttttttttttttttctagcttgggctctaggaaaagagccttttatcccaccttgtcttccagtccattttgaatcaagaaagactcattgaagactcctttgagaaaagtctgttttgaagaaggaaaaagaaatactgtttgagagaaggcaaacagacaaaaagggtgatagaaatatgtatttttgttgtatatgtaactctaagagaccttcctagagtgaatgaaggtagaaaactgaaaagggagtaaattaaggaatgattgaattttgtgggtcttgatggaaaaacgctggtcttcttttaatgtggaaaaacagctagtgcttcagtcctaggaattatgtctctgctgtgggcagttgtcataaactcttctcacaatccgagctgctctttgtcctctgtgaatgaaggtacttttgcttccatttcatccaaggatgaatgaaaatgtatagcatctgcccaaacctaaaaagtacagtgtgtttatcacgagagctttgtaaggtacttcacttccactttaaaattctttagtgctcaaaaccaactattgtgggtttttgtcaataaatactaatttttcaagatgaagtatggtgatttctattcatattgtggtcaattttctcaattttgtttcccatagatagcgtgatggaacttaaattttattttttacacttaaataactgtgctttttgtgatgcgtaatcatgattttctcttttccttgagattttaacagaccttatattagtgcatatgtcaaaataaaaatttttaaatagtaaatatgttgtaatattaaggatattgatttttttctattaaatgttgagcttggtgttggtataaaccctgatcctaaacggtaaattaatacttggaaattaagagtgtaactatgttatatagaaaccatcttgcgaattggtttgtgtgggtggtttttaaatttagtttttaatttttttagtatgtaatcgtactctttcaggattatctaaagcacttattgtaattggttgtttacttttctgcctcccccaccacattgagtggggaaataaaaccaaatgagtatttggaatctagtatgatccacccaatagtgaaagctaccaggatgggaatgattcctggagaatactggggaaacttgtagagtgtatgacaatttagcaagatgtataaggatgaggaggaattccaaaagcaggtggatgggggagctccaagaggggagtttccagctgagtgcaagttgtagaccatttactgtagcaacatcttagagtagaaggctggatggtagaagaggagctgcagagataagcagaggtagctagcacacagttatgagaagttggctggagaatgagatttggcaagtgctccatgtaatgaagatttgtttaaagaaaagatgtgatagaaaagggctgagttttaaactccccaagtttaagaaggtttgaagtttttaaactttaaaagtggccagggagggagccaatagagtaaaagtataatggtgagggttatgctggatgcaagaaattagtgtttcactaaagaagaatgttcagttgtgtcagatgtcacagagaggtgtagaaacataaaaagtgcaaggaatccttcagatttggtaaagaattgccactggtaaatttgtccagaacaatttcaatggggccagaaaactctggattgtgaagtactcagagatgagaacatgcaggcagtgattttattttagaagaattatttatctgtctttgcctttcatttaaaggcactttctcaaagttcaggttcctgactctatgatataattatttatagactgcctttctgaaaatagttctatatgggttaattttgttaatattagtatgttgacaaaagaaaacataaaggtcgatatgattattttcaaactgagaagctgctgtaccaaagctagtttataaaattagattttgtatttatggacttactcatctactatgttacagtagtctttgttttgtgaaactccaaggaaatattttctacacatttcaggttaagaaagaaaaacatgcgtttattttgtcttaaacatgaaataatgttttaagcattctaaaaagtacttacaaatggattaaacacattggcgttctttatagttttactctggttcttttttttgtgacttgttattcatagtctttgcaatgccgccctctagtgatcgatttccaaaaatgcattaattaacttgtaagcctgttacagtctttctcttttgactctactgatcctttgccacagcctttgtttggtgttctcttttattgctcttccattagttattcttattctcctttaatggcattagggaaagatcagaagtttcaggagcaaaaaaaaaaaaaaaaaatacatatatatacacatttgactatgaatccttaaaacttgtccatttaccagtctgggcatagggcaagttacctgtccagagttcttactgggaatgaatgagaatgtctttttgtggcacctgacacagacagcaaagagcaggcattcaacatataccagctgtctcttccaccctcttctccccaacattgctgagagtagggatcagtactgttttttttttttttaaacctgtcccttctcctcttatataacatctcaatttgttgtaattacctgtttacttgtttgtgttctataacttctagaggtcaggtatcatgtttggcttgtacatatttgtatctggtatttagcagaggccagtacacacagggtcctcattggatatatatttgttgaatgagtaaatgaattaatggatgccagtttttaataagaaccccagactgtgttaccgacatttctgttgattgattgattatgcagattgtaaatgggtaatatatgatataattagattttacccatgacctttcatagaggtatttatttcatgactttttcagtttattctatagttattggtcttctcaggttttggataatatgataatttgtgttttccttaagaattgtctgttttgttcagtttaaaaaaattattagcaaacacttatgtatagaattttcttatgatatttgacttccatatgtgacaaaaccccctttatcattacatttatgttatgtcttgtgttgtctgtttttagattgtaattagattggaggtatatatgtattttattgtttttttaaagcaatggccctttgaattttattcttctgcttgctaactgaaaaaataattttacctgttttttttgtcttccaggtttttctaacaacttagtacttccatttttctttttgtgcaaaagcttttattactctaaatttgcttctaaattacagatttgagtaaatgccatataatagaagatgctgtttttgttattttctagattttcaataaaatgtagctgcaatttcctcattgatctaaaagttacttaagagggtatttaaaaatgatgaaatgtatgtgtttacaattgttattttccatttttagtataatataatcagagaataaggaatgtacagtttctggtttttgagaattaaaatcttttttggtgatacatataagatcagtatttaaaatgtgccccaagcactgacaaagaaggtgagtcctctgaagggtatacagttttatatatttattcagatctctttttttttttatgtgcttcagctatcatgtatttatgataattttattaaagttttgtattactgttgtgtgtttgtcatttttctcattgttttttaacgttttattgctacattatttgattcttagaagtttgtgattgatatcttcataatatattttattcttcatcaattaaaaatattcaatcttttcattaaacattgcttatcatgtggatatccaaatgggaaaaacaatgaaacttgatccctgcttcccaccatgcacatttgattgaagatctaaatgtgaaaagtaaaataagcccctagaggacagtataagagaatatcttacatctttctatcagactgaaagtatcagtactttataatcttgaagtaggaaaatgtttcttaaacaggacacacaactcacaggtataaaagggaagattgataacctggactgttgacagttcaagaatttctgtcatcaaaagttactgataagagaaaaacaaaacagtaacagcagatacttgtaatatatatatctgacagatggcttatatccatactatgtaaactcctacatcagtataaaggacagacaacccaatagaataaatgggaaagagatttgagcagtcagttcaaactgtaaagacataatattaacactcagcagaatggctaaaattagaaagatcgacagtaccaagtattagcagaaagtggagagcgatgcacctctctttttgctgctggtgggaaaatataaattgtaaaaatcacttctgaaaactagcaacacctgctaaagctgtgggtatgtgtatacatacatatatccagcaacttcgataggaattcatgcagatacccactaaaaggcaagcacagtaacattcaaagtagcattatttgtattagccgaaacctggaaacaaaaatggccatcagcagtaaaatgggtaaacagattatggtagatttaattcagtgctgtatagtaatgcgtacagcaataaaaatgcatgaattgcggccccgtgcaacaacaaagataaattacatgaaccgatgttgatcaaaataaactagacacaaatacttaccgtgtatgattccctatataaaattcaaaagcaggcaaaactaggaatttaaaaactataaaatacaaaagcaggcaaaactggttattagacctcaggttagtggctacttttatggatgaggaagggatagggattgggaagtggtattgggcttctaggtattagtagtgttccttttcttgacttgggtggtggttacatgggtatactgaccttgagataattcagtgagttgtaaaatttatgatttgtgagtttttctgcatatatgtatgcttcaataaaactcaaattacggtaagcaaaaaatactgctttagtgtgaggatattattattaaataatattaaaataactagaaattcagtgaaacttaatcacgattgtattacctattgaaaatgtcagtgaataataccctctgctaattgtttgcctatatgttctcacattcagtcctacctcttctctgtcctctgtatggcagggtacatttagaaaaatacaaaaaaaaaaatgaaacttttttctcttatattttggttttgtttttattttcatttgttgattatatctttgccctctttttttaaaaaatttttccttatggagttttttcctatattgagagtctttgactccttttttctttgacttttactagaggagttctattcatttttctttttctttttcttttttccttttaccttttttttttttttttgagacagagtctcgctctgtcaccaggctggagtgcagtggcgtgatctcggctcactgcaacctctgcctcccaggttcaagcaattcttctgcctcagcctcctgagtagctgggactacaggcatgtgccaccacacccagctaatttttgtatttttagtagagacgaggtttcacaatgttggccaggatggtctcgatctcttgacctcatgatccgcccatctcagcctcccaaagtgctgggattacaggcttgagccactgcgtctggcctgttttattcattttcattcatattttaactgctggcttattcatttagtttctcatgcttcattgctgttatgcaaactgttttctttctacgtgtgtagagggttaactttaattctcctgaaaactatttctatgtttttcaaatatttgagcctatattttttgaattaacactattaaagatacattaatttccccagtttaaggtgaaacaatttaacttctcccattctttttcctctcacctctgtctttttaatgatgtagttcgtgattcagattaaactttattttcaattttttatttttgcattttgtttaatctcgagttaatttcagacatatgcttttttgtaaacatatttacaatcattattcactcaaaaatttattgagcacctactaagcaccagacactgtcctaggcaaataagaatataagtgaaaaagacaagacccctgatctcatcaacttgttgatggtcaaaaataggtaaataagatgctttaaattttgaagggtagtatgatgggaataagtagggtgaagtgatacagaatgaatgactgcagttcggattaaggctatgttaggttggtcagagaagtcctttttgaagcagcaatatataagctgagacttgaataagatgggacatgaagctgggtggagtggttcagggagaggggttagccaatgccctgatgaggtttcattttttggaagaacatttattcaatattactgattgaattttgtcaggcatttgagatagtcatgaacgaaacaggatttttgctttcaaagtatttacattttacgcagaacagataaatagatgagcaaataatttcagaatgtgataagtgctataaagaagataaaatgctagaatgaggagaagggaccactttaggtaggataatgagggatgcttttctgaggaggtgacatttgaattagtaacttggaagtcagtaatagacccagacatgtgtaaatctagggaacagcatttagggtagcgttttagttgggttggaacaaagagggtgaagatgggttgaatcttttcgacccttacgtgcttatgataagcttagaacttactctaaatatggtggaaaactataggttatgactacagattcaattactatagcaaaagatctttaactatagagcaccaaacaaaattgaagttactttcatataactcagtccaaagctggtagctggctattttccttccacaaggttgtctaaagactctggttccctctatcttagtctttaaccctctgataagcagttacctgtgtctatgtggtccaagccacttcgccatttacagatccatgtttctaacttgggaaaggggatgaaaggctagcaacttaaggaggaagggacagaaatttttgcatgtaggagtggaaaacattaccagaccttttagctttgaggaacatgttaatttttttttaaggcttccattaagaatgttgatattcataggggacacctaggtttcagtgaaatcaagaaagtcaaggaaacattgagagaataggctgaggagatagacgacatttctgatctcagataagtagttccagaaggcatgcacagtgaaatcatttgagacctgggatggaggatgggggagattcgtaatcttctttgtgctcagaaagagaatctgaatatttttgttaacagtttcagtgccagtccacttatgctattatgttatttctcttgggttattgtgacttatttatagattggctttgtagtttcttttaacagtatttcagatgtgcataggactggtaaaaaatgttgagcttttctgtattttggccagctgtgaattcattgagtatagtctttgtccctgaaacttcaatagcctttgtttaattgattctaatatttgaattagttgacagattttaaaatattcaagctttatgtccttaggtacctcgtgtcttaataatatagccatgaaaatattaacatttgtaatccttatacactaaacaaaaaaggggggagtgtgtatataataaagcatgttaccttaaagctatcacactgattgttttactaatcatttgtatatgtatatacaccatagaagtataaacaacatgcactctcacactgaaaagcattgctaaatatgatggtttctcctttgaaatgtactttgagatatttttgcatgtaggtacactattgattacatcttctattaatagactattccactgaaataagttggatgctggaaaattctgtttaaatttgattagatacttgagttgaatgaatttgtttaaagttctttttaaaattgcatgaaaatatgtgaaaaagtttaaaaataatctacagtattttggcaggataacaagaaataaaatttctttttaaaaaatgtgagttttggtaaatgtttctccttcaggactggtgcttctaatacaggttggtggttgtgcatatatttatggtttcacatatcagtactcaaagtctgatcataatcatgtaaaaatcattgaaggaaaaggttgcgagggtgctggcccagagtttcaggaaggtgtgtacctaagtactctaggacagatgtgtatttccactaaatatcttagaggtggttatttcataattttccttaaattctgtggattgatgacctcaaaaataatgatgtataagtatagttatggaatttagcattaccagcatcttaagcatagctgtagttacatatccttccatgtttgtgacaacatggagaagctcgtgaagacacactgagtcagtaagctgatagctcttactttctgtgaatatgtgcatagtttacaaaagtctgttgggcttctgatattaaaattatgttagtgaacttatatataaaataatttgaggagtggtcctccaactttaatgtgtttaagaatgatcttacaacttgctaaatcctgatgtcttggcccttgttccaagagctttgcttggttctgtggaacacacttgaaactattttagagattaaagaataaaaaatagaagctttgaagaatagtgatctgtgaagcaggaaattaaaatatcatgcctaagtcattaacatttctgcatagaaatttgcattagtttgatataagcctttctattattgttcactaaaatattttaagtgattgactttgaaagtgtcctttgttttagcttctttgttccattctttcctgacatgttcccttcagtcttcttttactttctttagtaaatgtttgagtgtttaccatgtgtcagtcattgtgctaggaatcttgaaggactcaaatacgcaaaacacatggatctagcctagaagttctcatttcagagattaagcgtcatttataaaacaagtgataattgtataacatgttgaatgacacagtcattcagagtagtgaaaaattcacaaaacagctttgtagtagctcctaaaatatgaataggagtttctcaaggggacagaagggaaatggcattccagttagaacaatatttgcaaagacatggaagcattaaagagacatttgatgagatcaaggtggtgggtaagttgtagaaaaggaggctataaaataggttagggccagagacttttatcttttaatttattttactgtttaacttatgccaggggagttgcagtgaatgtcacggggagaaaaaaagatatttcaaaagtagaattggtaggatttagagactagttggatgtgacttagagtttaaagttagaggagtcaagggtgactaattggaataattaaggaaaatacagaatctaatgaaatctgacttctttaattttcaattatatttggataaacaaggacctttaaatctgatagcctcttttcagggcttattcttcctgaagtcatcttagcatgtgaacattacctcttatagtctgaagccacatttgtttgtttttccctcagccctactggtgaaactgtacgatcttgcagtctgcttcaaaagcctgtgtgtgactcagtcattctactttaggaattgaaaccaaagaagtgatcagagatgtgttccaagatacatataaataggtctttatattatagtgtttttatgattaaaaaatgggacatggcttaaatggctttcaaaaaaggaattgatttaatttttgtatatctaaggtactgaatgggtaagttagggaaaggctgggctattgtaacaaagagatttactaatgattccatggtttaatttaaaaagatggaaatttatttctttataggggaatgtttcaggtcaattagaaattctacttctgtggtcattcagggacataggctctatccatcttatttctctaccacctcgtggggcattaatgatctatgctcaattttaggcacatccatatgctggctttattgaaactgttcttgccatggttgccagcaatgacacaggttgagtatctctaatctgaaaattcaaactccaaaatatgaaactttttgaggggtgatgtgacgccacaagtaaaaattctacacgtaagtacttaacataaactttgtttagtgcacaacattattaaaaatgctgtataagatgtatatgaaacaaatgaattttgtgtttagacttaggttgcatccccaagattatgtgtatgcaaatatttcaaaatctgaaaattttgaaatccgaaacatttctggtcccaagcttttttttgagacagggtctcactctgcagcccaggctggagtgcagtggcatgatcttggctcactgcagccttgacctcccaggctcaggtgatcctcccacctcagctacctgagtagctgaaactaagttgtgtaccaccacacccggctaatttttgtatactttgtggagacagggtttcaccatgttggtcaggctggtctcaaactcctgggctcaagtgatcttcccacctcggcctcccaaagtcttggaattatacgcaagagccactgagcctgtcctgtccgaagcattttgaataagggatactcaacctgtaattaatacatgaaataggcatttcagtgcttctgttgtttcactgtgatatttgaaactgctggccaactttctcctccgtgggcttctgctggtttctcttctgtccctctaagtatttgttcactgtgtctttttcatgttcttttcctttgcccttcctataaaggtttttgttctccagttttctgtctttggtccgttttcatttacatgtgtacctatgttgatctcacccagggccactaccacatgatggtgtctcctaaatctacatctctagcctgaaaacctttgttttgagcatcaagacctgtacatgtaatgcctctctacctgagtactctgcaggaaattaatatgtaacatatccaggactgacttaattatcttctttcccaagctggctctcgcacctgcattacctctcatagcctcctagatcagaaaccaggaagtcaacctcagcaatttcttgtcctccctcttccagtgagacctcaacactttattaaatatgcctcgagtattattgctgacattttcatttttctatctccattgccacagtcttagttcaggcgaagattattttaagagcttcctcagagatctgtgtttccatttaggctccctttcaatcctacttattggttaaatgggtcagtgattttcttctactggtatttggtgggcagcagctgtagttttaaattgcatgatatctggcccagtgctgagtgcagttcagctgttaatacgatactaaatgaagaacatttgtgaataaagacaagattagtaatgaagtaattattaccataatattcaaagaaatctggaagaaaattagaaactactttcacatcggtagggaaaaagtactagagccaaagaaaatgattttggtattttactgtttaagtttacatacaatctgaatcacggaaccaaagacatttgttgcagagattagcattatttaaggaaatcaagaacaaatagttcctgaactcagtgtgtcagttcaacctctgcacctttgaatttggctggactcctgtgggtcctaccaaggctgcacgtaacagaaagctatagacttccattcctgttctggccagttaacttaaattctttgtgtgtggacatctgacacacctgtttgattctccctcttggtgttaggactcctcgcatctgatctgtggtgatccttcacagtctctctcgcaatttctttgactgttgtataactctgcagtccttaactatatttgctcacctaattttttagtgctttctgagcttcaagtaagaagctttcttctttatttcatgcttcttggttgagtcatctctggcttacctggcaggagaaaggagtatttgggcataattagtgtttttacaaagtatgtatagggtattgtgctggctggtatatatggcagaaagaagtgattctgcctcaactcagattagtaataattctcctcctgccagttgacgtttattgtgcttttactatgtctagggcactttctcacatgctttactatgttttaatccatttaattctcacaacaatgctgtgagagaggtaatatccccataagtggggaaactgaggcctagaagggttatatttgaccagtaccacagagctagtaagcgacagagttgagattcaaatcggcataatgtttccagaatctgttgcctccgttttttactgactcttgaaagaggggttaatatggtacatgcatagctataacacaaacagagatgctcttttaaataacattaagttacaagacaacatgcaaaatacgtgagtcgtcattgtggagggaaaggaatattggactgccatccactagttctgtgaccttgggcaagcaacataacctctcagtactttagtttcattatccatagagttcaaaggtcttttgcaaaagttctgtggattacatttttttttctttttactaatttaggctttgtttccttgttgtgtttagatttaggtatctactgcagattaaattacatcttttgaaaattttgattttccacttaggttataccagtgagttagttatagctttgtatgtgatactgtaaataactccattatttgtgctttattatgtgaatttggacttgtatagaacaaaccaggtcctcttaagcataaacacattctgtaatcaatcaattctatatttattgggcatttactatatatcttattctctgctagaccctgtaaaatcttggtatgttagtcaatatattagctttggttctgcactcaagaattcttacagaaatgttcactgtttggtattttgatacatagtcttgaaagtctgtccatttttgtgaaatggcaaaatatcaaaatgacaacattttaaaacattttatttttgtgtcagagtagagacaaacactgatttcaaaaatttcaaaattttacccaagacccacagtaagaaacatatgacctatgtgtgtctaatgtatatgtaacagacaaaattttcatgaaacaattatttactacatgtgactcactgtaatactttagttctagtctatactattttgtgcaaatgttcattgcagtctatcaagttaacctcacaggttctaaagctcttaaccgacaggctgaaaatcctacacttgactgataaggcaaaattatgaatgctgttgttttagtgatttttttttttttttttttttttgagacagagtcttgctctgtccgcccaggctggagagcagtggcgccgtcttggctctctgcaagctctgcctcctgggttcataccattctcctgcctcagcctcccgagtagctgggactacaggcgcccaccaccacgcccggctaagttgttgtatttgtagtagagatggggtttcaccttgttagccaggatggtctcaatctcctgacctcgtgatccgcccgtctcggcctcccaaagtcctgagattacaggcgtgagctactgcacctggcctgattttttagtgtttttttttttttttttttgagacagagtcttgctctgttgccaggctggggtgcagtggtgctatcttggctcactgcaacctctgcctccctggttcaagcgattctcctgcctcagcctccctagtagctgggactactagtgtgcgtcaccatgcccaggtaatttttgtatttttagtagagatggggtttcacatgttggccaggatggtcttgatctcttgacctcatgatctgcccgcctgggcctcccaaagtgctgggattacaggcatgagccactgcactcagcataaaaaggtttgtgttttgaatgaacatttatttccttttttataaatgaggatttcgtacattttactaaaagggcagaaatgtgcttctccttttctttgaagtataatcttttgaactttatttttacacaagattacttgaagaattaggttgcattattatataagctttagactgagtcatactgtgtattcatatcacaattttttaactaaattgttttttagcagattatagcagtaggataaaatgcacatttttaatgcctgagctcccatcccaaacagcttcacacatagtctcattaaaataaaaaatcctgggagagtgaagtgtgtccttatttaaagaacttctggatctatttttacccttgtgaggctgattcttatgaggcagtttgcacagtgactcagcacatgggttctagaatcagacttccattgttcaaatcttagctctgtcagttgtaagaccatgggcaagctagttgattgatctctctgtgtctcagttttcttgagttacctcaagagggtggttataaccattcaaaatattaacatagagaaacaggacatatagatctataaaactcgactttattttaggaaagggtagaattaggatgtctgcagatggctccattgttcgttcttaaagatacaatgctgaacgctctcatgcgcatgatttttctcttgagtgctcgcccttccaattcaacagctcacttatttaattggcctaagacttaattcccctgcctctcttcctagctccaactttcatgaagcttccttggataaaaatcttagcaacagattatcctctcgcaccccccaccccccctgtgctccacagtttctgagattccaaactaatcctggcagggaaaatcaaggaaaccttcatataaggatctcatatttgagtgtaagctcacctgagcaggagggcattccaggcatgatcagcttgctaagtaatacaggaaacaaaaagttcagccagaatacgaactcctcattctagtagaatgatgataaaacatacacagataacttcaatactgtgaaggatatgataaatgtcatgaggatgacccaaagtgctttgggattcagagagtgagaagtaacattcataggaagttttatgaaagtagagacatccaggctgttttaaaggatagttaggagtaccagagggctttagggtgggatgaggatgaccaggcaaagggcattctaaagtcacaggggaaggaaatagaggatgtattgaggaaaagtgagaattcacccatgatgagaaatatagagagtaccacagattggggaataggggctgataagattggaactatccaggttttaaccaagtgatggaaagccttacatggtgggctgtttgggatccattaaagaacttacaagttaatagcttttgcttgaattctgcccaaagataaattttttaacttgaccagtaccatgttgcttttaaatggcttttttttgttttgttttgttttgttttgagatggagtctggctctgttgcccaggctggagtacagtggcgtgatcttggctcactgccacctctgctgcctgggttcaagcgattctcccgcctcagcctcccaagtagctgggattacaggcccccgccatcgtgctcagctaactttgtatttttagtagaaatgggtttcaccatgttaaccaggctggtctcaaactcctgacttcaagtgatcagcctgcctcggcctcccaaagtgctgggattactggcatgagccactgtgcctggccgttaaagttcattttaaatttttattttaaattttagtatttaaaaatcaggggattttacattacaacttagatttcctttttttcctgtaaaacggagatctgaaagtacaaggcccacatccctgcatgacatgtgagcagaggcaacatcctttggacagggcattctttgctttcagatttacaacacagtatatttgtatatatttataccaggctggcctccctcagttatgttgcctgtctgtctcctataggcatttggatattagatttctgcagtagagaaatgtattagaagtcaaaaatagttactgaaatggcattaaaaaaacagccagtatgaaccaagtttccatcagataaaaatatatcccaaataaatatttgcacatcaagcaaaactgcaatcaaaacaaatattgggatctagtatgcagaaaattcaggaactcagaatgtgcttagtaaatggggccaaaaagatccccaaagaatgtcacttccctgtgtctatgctcctatttactgctcttccaatgactttgggcttttccatgtgatttactttgaccaatgggactgcagcaaacatgacccaaccagaggcttaaagattgcttgcacgttggtgtctgtgctcgcttatcacgcaaagccctggctagtatattggagaatgagaagccacgtgaagcagagacagaccatcccagctgaggcccctataccagcctgactactgccagccagatgtgagtggggccatttagaaccatctagccttagtcaccccaccagctgactgtagaactgcctggttaaccacaagctaatgagcaatataaaggatgttgttttaagccactaagttttggaagggatttttgcacagcaaaagcttaggaggaagctttgaagatgtagcccaaaaatgacgttgtaaacctccagcacactagctactattaattagcctacgagagagaatcttctaatataacatctataatacctaagagaactgaactatatatttgagaataaatggatatgctggagtatagaggggtttgtgtgtgtgtgtgtgtgtgtaatctagaacaatgatcagataggagatggaggtgtggagattgactggctggtttcaagaaatgatctcagaaacagcttgacccctgggattcctctagttccctgattgtatatccgtaaaacctcttaccgaacccaaaattatttttctgatcatcttgataatacatttattataatttcatttttacattaatttctatagatatttgtggggttttcttgggatggtatactactaattatttggtttttcttttggggagcgggaatgttgatttaaatctgtatccacatggctggattaagactaaactcacttttcaggcattctcaaaagggaggaggttcactgacagcacgccccttctgatatcattagacaacttactggtacccttggtggcttctctgaatcctgtctatgggtgccaaaatacagggatttcaatatgggggaaagtaagaatttggagtattcccaggcattttgtgtgaatatctcccagcatcttattcttttaagtgtgacggctaagggatcatcaggacctactgatggtcttccagagatcatcaaatctggctaaatcttcaaagcttcctcctacagttagcttttgctgggcaaaaaaacccttccaaaacatagtagcttaaaacaacatcctttatattgctcagtacctggtgatgatcccttagctgtttatcagatgatcttcagggagtttgacagtcccatagggaaagtgatgaaacaattttaaaacgatatttaagaagtttgaaatgtaaaatatacttatgattttaatgaaaattctgttatatcctcaaatggaattataatcttaaaagttatgcttttgaaataaagacagtattggccatttcatcttgtgttttttttttttttttttttttttttgagatggagtcttgctctgtcgtccaggccagagtgcagtggcgcgatctcagctcactgcaagctccgcctcccgggtgcatgccgttctcctgcctcagcctccccagttgctgggactacaggcacctaccaccacgcccggctaattttttgtatttttagtagagacagggtttcaccatgttagccaggatggtctccgtttcctgacctcgtgatccacctacctcggcctcccaaagtgctgggattacaggtgtgagccaccgtgctgggcccgaccatttcatcttgattaaaattgagttaacagagtttgtttctcctcgtctgcctcatatcgttagtgaattatatcttttgttaaatttgcttttcttgttccaacaggattacatgatatctctacctcataaaatgaatcaatctatctctaatgtggcttattgatgcctaaaatagaggtgaaatagtaacataatgccagaactcagaataaggtcataggccaggtgtggtggcttacacctgtaatcccagcacttttggaggccaaggcggaaggattgcttgaggccaggagttcaagaccagcctgggcaacttagtgaaactttgtctctacaaaacaattttaaaaaatcagaataaggtcataaatataaatactaaacagaatttcagtgtaaacaaagtagtatatgtattgggatatgaatctctgagtttgatgattttgtataaacaagcaaagaagaaaacataaatagaagatacatgattaatatctgcaaatttgattttatgttattttctagtacttggtgtgttgtatgttataaaattttgtcaaatagtagcagaaactactgacacctttgtattgctttcaaagtatcataactactctggaaaaccagttatgtttttttcctctagggcaaaggcaagtaatgctttttcttggtgtgtgtgtgtgtatggggtgtggtgggacagggatgaaattgctgcattttgccactaaaggaagagataggacttagacagttcattcacagatggactctttgaactaaaaatggtatatgagagcctgcatagcatgttgatgaagatcatgggctgcctgggttcaaatcccagccttcttacctgcggagcatgttgattgattaacatcatgggctgcctgggttcaaatcccagccttcttaccagctgtgtgtacttggtcaaaccacttcatttctgtatggctcagcttcattttacttattgagggaatagtagtaatatgtactatatatgtatgtttgttatgagaattataggagttaatatttgtaagcattagaagagcatgtagattggccaggcgcagtggctcacacctgtattcccagcactttgggagctgaggtgggcggatcacgaggtcaggagatcgagaccatcctggctaacactgtgaaaccctgtctctactaaaaatacaaaaaattagctgggcgtggtggcggacgcctatagtcccatctactcgggaggctgaggcaggataatggcgtgcacccaggaggcagagcttgcagtgagctgagatcgcatcactgcactccagcctgggcgacagagcgagactccgtctagaaaaaaaaaaaaaagcatatagatcatggtaaatgctatacaaatattaagaacatgcattagaactaaataaaaatgtctatgagagggaaatgttttttataaagatgagattacgcggctgggcatagtggttcatgcctgtaatcctagaactttgagaggccaaggcaggtggatcacctgaggtcaagagttcgagaccagcatgactaacatggtgaaaccccatctctactaaaaatacaaaaattagccaggcatggtggcgcatgcctgtaatcccagctacttgggaggctgaggcaggagaatcgcttgaacccaggaggtggaggttgcagtgagccaagatcatgccatcacactccagtctggtgacagagtgagactccatctcaaaaaaaaaaaatgaaattatgattcacgcaaatataaaatgagcacttatcaacacatttaactttggttgaaaggagaatttaaagaaccatacatatataggcaataaagaatactgaaatgaatttacaagtaatgtaaaataaatgaaaataaatataaattgtcctcaagataatactcagttgtattccagggaatataattcatgtgcatttatatggacaataattcacattattatccattttctgcagcttacagagttttaaaatagctcaaagacagtgaaaggtagagatcaccgtgataggtaagctatacaggacacccactaatttcttggagtgagctcatatcgaaagtttttcacattttctctgacatgtattataaacaattataaatgtaatcattataaacaattataaaaccagtgcaaacttaataataaatattaccctcagaggaggaagtagaagggacatactttttccccaaatatgactttttgaacagcatatgatattgacaaagactgtctctttaaccaaactttagttaggtccctctggacaagcccttttcttgtctagaccctgtccttgtcagaccttcgttgtccagtttgagcaagaatcttgctaagtcagtttagagagaatctcctatcccaaatatctaacatttcggtatctgatcaaattcctgatcccccaccatcccccaggcaacatatgatcatactggcctaccttcagcaagaatcccatcttacccctagtgtttcctcttagtgatttttccatccattgaccccatcctgccccttggctataaattcccacttgttcctgctgtatttgaaactgagctcagttcgatactgacgtctcttttcctctattgtaatagtccctgaataatgtttttactgctttaactgctgtccagctctagttcctttaacagttaatggtcctgtgatacgggtaggattagatttattattggattcctggatctctcatccaggactcagctgtatacctttgaagcctttgtcttcactcctgactgattgatctgggatctgttgatgagtctgactcctaaaccattgccctacatgacagttcactgaagcatggtaggaacagatattcatacttaagattctgagtttactggttgaagttgggttagagacctatgttttttttgaaaggtactactgggctggtagtctttcttcatggcttttggttccaagtggggattcacatccagaatcctgagatggaaatggtttctcctggcactctgtgaggtctccctgttctgtttgaacatgcttctcccatgggaacttattagttgactgaaaccctcttctcaaggttctgctgactacagtagtctcccctgatccttagttttgctttctgcagtttcagttaccagtggtcaactgtggtctgaaaatattaggtagaaaattccagaaataaataatttgtaagctttaaattttgtgctattctgagtagctttatgaactcttgtgctatctactccatccttcctgggaagtgaatcatcctttttcagtgtatccaaattgtagatgctatacagccattaagtcactttgtagtcatctcagttatcacattcactgtctgtgtattgcactgccggtgttcaagtcacctttattttacaaaataatggccccaaagcacaagagtagtgatggtggcaatttagatatgccaaagagaagccatgaagtgcttcttttaagtaaaaaggtgaaagttctgtactcaaaaaaaaatcgtatgttgagatttactataagaacaaattttctatgcgtgaaattgtgaaaaaggaaaaaaatttgtgctagctttgctgtcgcatctcaatctgcaaaattacagccactatgaatgacaaatgcttagttaccgtggaaaagacattaaatttgtgagtgtgagacattaatagaaatgtgttctgactgacaacagccgagtgtaatactatctgcggtttcaggcatccacgaagggtcttggaacatattccctgtggataggagggactactagtatgtgctcctctaaatctgtttacttattatttgacaaggataatttagaacttcactggcttctctaggaaacttaagatctttccaaagtggctcctctaagacctctcccttcccattgcttctgctcctccttctccccttgccatctttgatttcccctttaattctcttgaatcttttgatgtttcccttcaaagccttacctctttcatcatccttctgtccatatctgccagactttttcttccctacttcagcttctcagctccctataggcacttgaactttaagcacactgtccctcgttgaaggttttcaagggtctcaaggatccccaaaagcaaccacctgaggctataaaggaaaaaacactaattggaaacactgaatattttatccagtcagatgggctttggagacatccttaaagctgttcgatgtcacctcagttactgcctaaaatttggtccacagcctccataagattacatgggaaaatcttaaaaatcttctctataaatattattaaaaaacattaactctcatatagaacaggtaacctaatttgttccatttatcaagaatacaattttgacaaaaatgtagaccaaagataaaactatattactttgtttacttgattaattgctaaagttttagaataaaagctgtaagatctgtttgcggctatctgcgtatttgtttgtatatgtttatgtatgtatgttatatatatgtgatatttttctacctaaggatagtattaccagcataattcataaaatctcataaggaagcactattcaaattatcttagagattaatgaactcttatataagttaaatattccaaaaactcccagaaatgtggaaactaacccaaatgtgttttaaagttcatacgggctggatgtggtagatcacacctgtaatcccagcactttgggaggccaaggcgggaggatcacttgaactcaggagttcaaaatcagtctgggcaacatggtgaaacccatctctaccaaaaaaaaaaccccaaacgcacacacataaaaaatacaaaaattagcctggcttggtagtgcatgtctgtagtcccagctactcaggaagctgaggtgggaggaacgcttgagcccgggagttggaggttgcagtgagctgagatttcaccactgcactccagcttgggtgacagagcgagaccttgccccctcaccttccaccccccaaagaagtacatataactttgctaagtcttcaataaataagattaatattattggtttaataaaaatgggtttgtcttaatgacttgtcagcgttaagtataatgtgggcatgtttttattctacttaggtttgctgatcagataaacttatgtctactagatatttaagattataaaaattataaatttcacctaagaaccactgtacaagtaaacatgcactaacattgaattgctttatagccatgacttcttgtatatcaagcatagcagtaaaacaaaaatccatgtgtttaacttttttaggtttttgcttttataatactttcctaataaatgcatatgttgtagaaatcgttaacagggaaataacttgagatgttggctagctttgtttaatgttatagtatgtctgcctggaaattgtttttaaaatctttttagtaatttgcaaccttagacttacattacattacattaatagatattcattaaaatctacataatttctaagaaatataaatgactgaaatactaatgctaaacctaagtttgagtttatatactttggctttttattttcatatgacataaagaaactagatataattgggcctgttaataaaatgttcttctgaaagattacactataaagaaacaaatatctctaggaattgtaagatgatatactcataaaacctgctagtttgctatagaatgctagtatgtgacacagtttacagctgtctccttaagttttctttgtaaaagtgtattggtcgttaaaattacatttaatacatgtaagttaaactactaaaaataataagtgtgaggagaaacaactctgtatgcaaagtatgtgaggaatgaaggacttttttttactgttgataagggaaaaagagtgtaattttgtcttaaaataagattactggttattccagaatgagaaagaggaaaaatgtaggacgaaatctgaatggatatggaaaactgtaggtttgcagaaaaggaattctttatgttttcaagctggctatgattaaattgatttctatataaagtttttttttaaataacatcagcccaacagtgtgctaatataaaactagaacttggttttatttctgttaaagcaacaaagttttcttggaatattggtctgttcttagtaagagactgtgaaaggtttttcttttttttttttttttttcttttttgagacggagtttcactcctgtttcccaggctagagtgcaatggtgcgatctcggctcactgcaacctctgcctcctgggttcaagcgattctcctgcctcagcctcccgagtagctgggattacagacatgtgccaccacgcctggctaattttgtatttttagtatagacggggtttctccatgttggtcaggctgatctcgaacttccgaactcaggtgatccgcctgcctcggcctcccaaagtgctgggattacaggcgtgagccatcgtgcccggccgcctctttaccttttaagtaatctgcctagggaacaaaaattctgtgccttatcaaaataatttattgtgctttgtgttttctatgtcatctccttttaagagaacttaactattgtttcatagttatcgaggatcctgtttaatcagcattcaaatcttttgacatttttgagttttccaaaatcaaattctaaatgaattctttttttgtttgtttgtttgagatgaagtctcgctcttatcccccaggctggagtacaatggcgcgatctcggctcactgcaacctccacctcccaggttcaagcgattctcctgcctcagcctcccgagtacctgggattacaggcgcctaccaccacgcctggctaattttggaatttttagtagagaagggggtttcaccatgttgaccaggccggtctcgaactcctgacgtcaggtgatccgcccaccttggcctcccaaagtgctgggattacaggcgtgagccaccgtgcccagccctaaatgaagtattaatcttggactgaccttgagatttcccataggtcccctggaaaatgtcaaaggattttttctttcacctagtaaaaattttgtttgtttgatatattaaattatgtgggaaacattgtcaagtaaaaagtgatgcttaagcttttctaggttatatttgtatgggtaaatattaataataaaacattccagaaattatgtgaatttcatagacatttgccaataccctcattgtccatcatatgttctggtatatactgttatcatcataatgccaactattatttaaatatttaaatattgtgtgtcacaaaaataaccaaattccctcaccagttttatcatttttataatgaacagatgtttaaccacagacattttaagtcttttattatccacagatagtttttcttttactctgattcttcctgaaagcttccataatcagcttataagccagaatgcttcattttcaacaaaactgattgtctcagagacctgtggaaaggactatgccaggtactctggggtatagccttctaatggcattgcttagatacttgtagaccataccattggaatgagtatggatttctgcagctagtagagaagctgacgggttcataaaactgctaacgcaggataaagcagaagattcaattacatggggccgaataaactaataaataagataatttttatggttattgttttggaatatttatcattctttaatgtcttatttaaggagactttttttctgttgtctcatgctttctataactcatgacaatttagtaggttatgcttttgtaaaaagagatgaaacatattttcttccaacctgatccctccagaattcagaaacacttactgagtattcttattctcaatggcaatacaattatttggataagttcaataagattctgtcttccttgtaacagggcatacttggaaaaatcagtttataaccaaggctttgactggaatgtcatatttgagaatgatgcattgaatcagatacgtccagacagttttaaggcacaaagactttatggagtcaatgcttacaaagtcctcttgggaaaaccggcctggtacctggcttattgggcaggggttcccaatccctaggtctcagactgggccatacagcaagagttgagcagcaggtgagccagcatcttccctacccccagtctgtggaaaaattgtcatccacaaaactggtccgttgaaccaaagactgctgttatagggttcccagccttataggtgggtaaggaaggtcacttcctggcaggtccaggaagcttaggatattttgggaacctcacaagagaggaattcacccaaatctatagttcttataggaaaaatatggtagtgcttggcttgacttttaatcttcaagaggcttttagaagcctaatatgaaggtcaggcacggtggctcacgcctgtaatcccagcactttgggaggccgaggtgggtggatcacgaggtcagaagatcaagaccatcctggctaatatggtgaaaccccatctctactaaaaatacaaaaaattagccgggtgtggtggcaggcgcctgtagtcccagctactcaggaggctgaaggaggagaatggcatgaacctgggaggcagaacttgcagtgagccgagatcgtgccactgcactacagcctgggcaacagagtgaaaccccgtctcaaaaaaaaaaaaaaaaaaaaaaatctaatctgagattcctcataaaaaattccagtaaaacaaactcaaaaaggcctaagtggtcatttttgctgcaattatgtaaataaccaggccaaatctaatgagaccagacttattttgtaaacaagagttaaaaaaggaagtgagtggagagaaaatttatgcttaaatggaaaactatagtgtacccttgtgggttattaaattctagtcctgttcattttttttttagctttccgttgtcaacctataaactggactggatcctgccatcttatgcattttctcaattattctagtttcctctgatagcctactacaagtttccaaactaacatttctaatttttccccaccttcctcacttggcatcactgagaactaaaactatgcttttcccaaagcccaggaagctgaagctgtaccacttggtataagctgaagaaatcaccacaccttttcatgtatgggtaacttcatgagaatctcttctttccttgaacaataagagggactgacaaagtctgtcttcttaagcaaactttaggcaggtttctctaagcctttttcttgtctaggccccattcttgcaatacctgcgtagcccagtttcagcaagaatcttgctaagttagttaagagaaaatctcttacccttgatatcagatcactcttgatacttggtcaaattgctcatcccccaccaggcaatatgtgatcaccctgacttgccttcagcaagaatactgttcaggctctataaccagaatccccctatatttcctcttagttatttcccatccactcacctccatcctgctccttggctataaatccctgcttgttattgctgtatttggaaatgatcccagttctatactgaggtctctttccctttattgtaatagtttctgaataaaatctgtttttactgctttaatcacttccagttctggttttctttgacattatcagaaatatataatatgaaagagcaattactgtcatgtgtttacactgacagatatttcagcttgcaattgtataaaaccagtgatgtacaagctgagttggtgctttgtgtacatagagaatgtccatgagggcgatatacttggcaactttttgtcttatttattactgaaaacctagggtatggaaaaagatacattgagatctgtgtgtgaaaaggaaggcaaggcattgctatgcaaataaaagaggtggcctctaagtggtaatttatattgttgtatttgcaaagaatagttggtggtcaaaaatacttcattaggttttgatttactgttgaaggaaatactgctaattattagtcctatcaagctgtagcctttaagtatgtacatatctttttggcatactatgtgaggaattgggctgtaagtataatctgactgttgaggaaaaaagagcctcatgttagtttttaaaatgagagacaatgaaaatattccctcataatgctgataacttgagtaaagaccattttgagtaacttatttgagcaacattgtcacagcagtatatttattcaataaatatactgaattgcttgaacctccacttcagtctcaaaatattccattttaaaaatttgcagatgacagattagagtttcttttgaaacaactgaacggtggtataaaaatggtttaaacttcaatgttttcccatacctttctttttttttctttttttttttttttttttgagatgtagtctccatctgtcgcccaggctggagtgcagtggcatgatctcagctcactgcaacctccacctcccaggttccagtgattctcctgcctcagcctcccaagtagctaggactacaggtgcgtgccaccatgccctgctaattttttgtatttttttttttttttttttagtagagacggagtttcaccatgttagccaggatggtcttgatctcctgacctcatgatccacccgcctcagcctcccaaagtgttgggattacaggcgtgagccaccgcgcctggccctcccatacctttcttttataatttctttgcttttgagaaagaaacacatgacttattgtctcatatgtttaaaaattctatcactgcaaatgtgagttacttacataatgcttcatgagaaaatgaaataatacttcttagagctaaaagcagttaaagaatgattagaaaatctatttactctgtttcccatgttgaaatggtctttctgcattcgtgataagtctgtcaatttaatgcctgatagagttctgaaacatcttcagtgatgaatctttgtaatttctaggttcacaatagtctaaatatccatttgtctctgacaaagccaccaaatgtttattgtcatttaacaatcgttaatggagaatcaagagtttataatttggttaatcacaatagaaactagttggatgtggaactcaaggacttgtggctcagagtccttgtcattgggtcaggtgttgacaatttgataacagcacaaacaaaatatagtctctttcactgataagcaatagtaataaatatgatattttatttaaaataaaatattttgaaaaagtatcttagtattgtggtccatgaatgctgaatatggatgctgaaataatatttgtcacctttgtaaaaaaaaaaaaaaaaaaaggtagttttggccaggtgtggtggctcgcgcttgtaatcccagcactttgggaggctgaggtgggtggatcacctgaggtcaggagttcaagaccagcctggccaacatggtgaaaccccctctctcctaaaaatagctgggcgtggtggtgggtgcctgtaatcccagctacttgggaggctgaggcatgagaatcgcttgaacctgggagatggaggttgcagtaagctgagactgtgccattgcaccccagcctgggcaacaagaatgaaactctgtctcaaaaaaaaaaaaaatgattgtgtttgttgatcacttactatgaggcaaacattctaagtgtaatgaactcacttacagtggtttacaaactgatgcatggagagaataatttatccagactcacccagctgttaactggcagaattaggattttaacagagtcagtctggtaggaaagtctgctctttcccactatctggcagagataaatagtactgtaggagtccctgagaggtcaactcaagtgtaagtattttatattttgaggttcctaaagtttttctctatgtcattaacatacaagttgcccacattattctccttgtcattattactacaaccagtgagtattttgatagaatacttctgggagaggcccaggcgcggtggctcacgcttgtaatcccagcactttgggaggccgaggcgggcagatcttgaggtcaggagatggagaccaaccccgtctctactaaaaatacaaaaaactagccgggcctggtggcgggcggctgtagtctcagctattcggagaggctgaggcaggagaatggtgtgaatccgggaggcggagcttgcagtgagccgagatcgcgccactgcactccagcctgggcgtcagagcgagactccgtctcaaaaaaaaacaaaaaacaaacaaaaaaaaaccttccgggagagaagcggttactaagaagggaatgctttatagacagagaaaggatcatttttatggtcatagattattttctagtcttggccaaatttttttttttggggagggtgtattgtggtccaaagacaatttaggtgactcataacctatcacctctaatcccccaggtgtctcaagattgcatgctcatgagagtatctcagtgagtgaatagcagtgtctcctctcattaaaaatttatgcatatcataaatacttttaaaaatgagagtgtctcagtgaatgaataacagtatctccttgtatgaaagatttacacatatcatactttaaaaagtttgagtttaatataaattcaaaaatataaatcagctttcctgtaagtatattaaaaacctttttatgaatagcaattcaaaatattttaaaacatttattttgcacagcttttactagatttatcttattgctattttgttcaaaataaatggaaactcaagtttatagtcttgctctaaatcattttttaaaatatcagatttcagaaagtaacgtttttggcttattttagatatacctgcttgctggctgttgtgtgttggggtagagctttctttttaaaatctagtagcaccctctagagcaaaaggtaaaatacaatttgataagaaaggagcagtttcacaaattcaaatttcctatccggagtaatagtttgttacttagaagtaccaaagagctggccaggcatggtggctcatacctgtaatcccagcactttgggaggccgaggtgggcagatcacttgaggtcagaagttcaagaccatcctggccaacactgtgaaaccctgtctctactaaaaatacaaaaattagatgggcatggcatggtggctcatgcctgtaattccagctacttggttggggggtgggggggtggtgggggagaggtgggcggggctgagggcagagaatctattgaacccggaagacaggggttgcagtgagccgagatcacgccactgcagcactccagcctgggcgatagagtgagattccctctccaaaaaaaaaggaagtagcaaagagctgaacctaatttttttttgctcaaatatatatatattcttatcaaggatgccttttaggtaagttcttcttacctaagattaaagattaatacatctttttcttacctccttgtgaatgtaatggtacataattttattttagaatggatattttaataaaattacccataagtattgaatttcttgttgaccaatataacatgctaaagttttattgtatgtccattttgtatgtgatagtgtgtttgttttgagaattacaaaatagagaataaaccacaccccttgtacttacgctcttatttccacttgttttttgtagtagagcatgacacatattgggtcttgtagtagtcttgagtaaaaaattatctcgattaagttaattaataatattattattgatatatatccattttctattacagaagaaaatactcaggaaacatcccaggtgaagaaaagtttgactgaaaaagtttctctctatagaggtgacatcacattgctagaggtagatgctatagtcaatgccggtgagtagttgattttcctgtgatgtgtttgttatgtaagtattatttcaaaatttttaaataaataagaatgtaagtattttagaaaaaaatgctttttgacgtagaaatgtctattctgtttctcttcttgattaaaaacattggagatctatttttttgtatgttctgcaattaatgtgcatctacagtaccctctacagtgaaaggcgctaggttgagattaggatactgcaccactggagaagtgacagattgttgcagaaagttcttcagaaagaactttagcaagtatattattgttactttcgtagcttgaattaatagttggccaacataaatacaagctcatcaagcttttttcttcttttgaataggttgtcaggtgatgattgaactatgtaagacaaaagtgaaaatataaagaaattatttcagttatttcaaaacttaagttgttagggttccagttttcattttcattatgaaatgcttaattttaaccagcatattttaattatttttaataattagttgtctagttaattttcctatttcaacattgggaaaaattttacagatgttatattttattatgtggctatatatcaaaaaagatataacagccgtgattctacaaaaatattgtaaatgagaggatatttaatgattttaatttgtgttttgtaaagttaggctgtttgaagtttgcaagtgtcaattaaaaacaaatctggacttaggtaaggagaggctttatctaaatagactatgacaataaaaggaggaggatgatttcaatagggggaggcagaatattgtgttatcgggaatgtttttccagagttcagctggttctggggaagggctgttaaggaggggttactcaccttccattgcttcagggtggaccaaagttcaggggttttgaggaaggagaggagcctgactaaagtttggtcaggtcgtttgtgggcattgaccaaccagaatggtaaatggggacaaagagtttggctaacatgtatgagacagagaatgggaatttggaaagtctgtttctggccttgtcattggttgcaaggtggtcatctgtcagttttatctagtaaactttcccagaacacaaaagggtaggggtaatttcttgactgtggctctttccaagaatacagagttcaggtgagtttcagtgttatctccaggtttcctttggtgataataaattcacagagaatagtaggaaagtgcattggcaggtgaacagaagggtctaatggagaactgaaacattgttcaaggatattgtacagctctggcaatttagcagaaagttcagaataccggtcagcttgttgttcccttagaattgggtatcagttacagctgggtgcggtggctcatgcctgtaagcccagcactttgggaggtcgaattgggtagatcacttgaaggtaggaattcgagaccagcctggccaacatggtgaatctcatctctaccaaaaaaatacaaaaattagccaggtgtgatggcgagtgcctgtagtcccagctactcgggaggctgaggcaggagaatcgcttgaacctgggaggtggaggttgcagtgagcagagatcataccactgcactccagcctgggtgacagaattgagaccatgtctcaaaaaaaaaaaaaaggattggatgtcagttgctttgtaccacagctgctttgctgtaatcaaggctcagttttctccttttcttcttctgatgcttctgcacttcctttctcctttgctgcttctgctgcctgtctaaaatgtaaaagtcttcttgagagaggaggctgggtcatttaattgccacccaatatgactcactccttcatcctcaggttacctcatagggtacaggtctctcttatatgtagtatctatggattgctcatttgtggccctgggtatcaagatgctttctctgtcccgtggggcctctgggggaagacaggcccttagaaagggtctcaggaagtcctctcctgtagttttaataagatatcactatagctagtaatttaatgtatatgccctaaattctataaatatatgagctttaattttaaaacatttaaaagattatatgtgtgtatatatgcataaaagatatatgtgtgtgtatatatacataagagagatatatatacacatataatcttttatatatatacacacatataaataaaagatatatatacacacatgtgatcttttatatatacacacatatgtatatgtatacacatgatcttttaaatttttaaaaattaaagctctgctgggcgcattggctcatgcctgtaatcccagcactttgggaggccaaggctgatggatcatgaggtcaagagattgagaccatcttggccaacatggtgaaaccccgtctctaccaaaaattcaaaaattagccaggcgtggtggcgtgtgcctgtaagtcccagctactcgggaggctgaggcaggagaattgcttgaacccgggaggcagaggttgcagtgagtcgagatcgtgccactgcactccagcctggcgtcagagcgagactccatctaaaaaaaaaaaaaaaaaaaagttaaagctcatatgtttatagaatttagggcatatacatcaatatatatagacacataaaagatatatatttatactcacatatgatcttttaaatttttaaaaaatgtttatatgtatgtacatatgtatataaatacacttatcagccttcctgtgtgttcttgtaatttctagccattactcttagttctgtcctgaggaagtacaattgatcatatctacttcctttttaaatacttgaagatcactctcacaagttttctccttcttgttattaagataacattgaatttgccacgttagcacacacttaatacagtaataatggtctttgttggattttgctgtcttcccatggaagccacacactagtgccattttctctttttgtgtcaactccccaagcaatgtcatctccttcttaaaaatatttaatactgtgtatttgttaaattgaattatttaatatgtatgattgaatttgtagatctctgactaataggacattcagcattggaaacgacacagtgaaccagttggctctggtgttttttatctgatcaattaatacaaatattttgggagtaattattgaaataaatggtgcaaaacagaagaacatcattaactacctcatcactattttgttcttttaaatattattatcttgctcttgcctaaatgtataatttttcatagctgctgcataatatataagggtatgatgaatttatatgaagacaggcagcaacttttgcttactcccaaaacgatttggtaattttagctcacctctctggttgtgatgattgtaatttggccatgttttgcatctcacaaggatagtctcatcaggaagatcccaggtagatagaaaagggatgccaagtgaatatacactgtaatggctctatttacagctttctactgtgcagtttgtttgcctggtgtggaaggagtggaacagctgttaacttttcaggtgaacaagacaacatggcaggaaactatagagctgcctctactgagagggggagtgaaaaacagtacccctagtcactatgccaaagcagcccagttgtcacctcctattagacttctgaagttctcatgaccatattagtacattggaacacctggtcttagttgctatgaatgaaatgatttcatattttaaacttatttctaataaagtgttttttgaactaccttaacctctttaaatgtgacccagggtggacttcttgtgtattatattcttctctctaggaaattatgcatatttagtatgttttaataaaacagattttgcaggcattatagtacacagggcagtagcacaagtttagagttaggcagacctgggttcaaaattcaggttatcataaccaaggccattttttatttaaactttttattttgaaataatgatagaaaagacaaaaataacacagagtcctatgaaccctgtgtaaacttctcccaatggtggctttgtatatagctatagtacaatatcaaaagcagattttaaaaaataatttattttagtttcagggagtgcttgtatacttgttacatggtatattgcataatgctgaagtttggggtatgactgatcctgtcacctaggtaatgagcatagtactcaatggttactttttcaaccttgccctttcttttccttcccccttattagtgttgccatttttatgtccatgtttacccaatgtcaaaaaccgaaaattgatattgttacattactgttgtctagactacagactttattcagttttaacaatttttaaacttgcattcatgtgaatgtgtgtatatatgtgtgtagttctttgtagttgtatttaatgaatagattcatgtgaccaccaccacaatctagatacagaactattccattatcataaaagaactccctcatgctggccgggcacggtagctcacacctgtaatcccagtactttgggaggtcaaggcgggtggatcatgaggtcaggagttcgagaccagcctggccaagatggtgaaaccccgtctctactgaaaatacaaaaattagctgggcacggtggcaggtgcctgtaatcccagctactctggaggctgaggcaggagaatcgcttgaacccgggaggtggaggttgcaatgagccgagattgcaccattgcactctagcctaggcaacagagcaagactccgtgtcaaaaaaaaaaaaaagaaccccctcatgctgccacctttgtatttatatccacccatctgcctcccttcctgttttccatctctaaggttttatcatttttagaatggaatataattctaaaaatacataatcaataatgctgcagtgaacatggcagtaccgatatccctttgacatacttttcagtttctttggatacctagaagtagaatcaacagatcatatggcagttttatttttagcttgttgaggaacctccatggtgttttcctctgttaacttacgttcccaacagtgtgcgggagttctcttttctctgcatcctcaccaacacttgttagctttcaacatgacaaaagccattccaacaggtgtgaaatgatatctcattgtggtttccatttgtgcttccctaatgattagtggtgctgagcattttttttcatgtacttgttggtcatttgtgtgtcttcttctgagaaatgtctgttcagatcctttgcctgatttttaatggggttatttgttttcttgctgttgagttctttaagttctttatatattttggctattaattccttttcagatgtattttttgcaaatattttctcccattttgtgggttgtctcttcactttgttaattgtttgctgggcagaagttttttagtttgaggctgtcccatttgtctgtttttgctttcattgccacagaaattgaacttacagtagagagtatggttaccagaggctggagggggattggaggaaggaaatggggagttgttgatcaaaagtttcaaagttttagatatacaggaggaataggttttgagatttatctcatagcagggtgactgtaataaataataatgtattatatatttcaaaataactaaggaagtaaatcgcaaatgtctcaccataaagaatgatagataagtgaggtgatggatgtgttaattagcttggtttaatcatccacactgtgtatatatatatcaaaacatcacattgtacctcataaacgtatacaatgattggtcaatcaaaataataataataataaagtcatgtaaatagaatcatacagcatgtaatcttttaaggttgccttttttcactaaatataatgctctgagggccattcagattgtattaatgaattaatgaatttatttattaattcagtaattgttcattcctttttattgttgagtagtggttcattgtatggatgtaccagagtttgttcaaccattcacccattgagggacatttggattcttttcagtattttgctgttaccgataaagcttttatgaacatttatgtacatgtttttatatgaccatacatttttgtttctctgggatagacatccaagaatgtgattactaggttacatgtaagtgcatgtttagttttgtaagaaactgctaaactgtttttcatagtagttgtaccattttacattcttaccagcaatgtgtgataggttcagtttttctacatccttgccagcatttggtggtataattatttcttatttattttagctgttgtaataggtgtgtgttaatagctaatcatgttttttgatatttattttttatttttaaatttttttctctgctgtttgaatcagcatcatcattattttaatttgtgtttccccaaaggttaattatgtcaaacacctctccatatgcttatttgccacctgtatgtctttttggtgaaatatcagttcatatcttttgccattttgtaatgggtctcagtgatatttgtgaattttgggcatttttattttttaaggccccaccctaaatcatattgatatatactgaaatatactacagcccacatccaaaacagtccatacttagttggatgatagttaattagttaatataatggcatgttttgtagatatttaggtaaacattaattttgattttgtacttttcatattttggaaacctaaattatctttttctaggctcttgaaaagctttttggtattatgctcatagtactaattataaactgccctgctgacatcagcttgattgggcaaattattcaaccctttaatcctcacttttgaaatctataaatagggataatactagtaattaagatcagacagatgttgtaaataatgtgtgaaaaatacgtagcacagttctcgcacaaaatatgtacttggtatagtttagctatggtatttatttttgtatggctactgaatggatttaatactactgctgtcttttctgagagaactcaggttagtagaggaaacggaggatatcttctgtgttaagcattgagattttccattattcagagccagttttccgctgaaaagcactggtgctcaagctagagcagctgctttcttcctgagcagttttcaaaattccacatatttttatatggatttgtctagttactaatatataattgacacttacctgtatgtacttttagtttgactctattttaccttattttttaaagacaggaatctcactctgtcactcaggctggaatacagtggcataatcatagctcaatgcaggcttgagctcctgagctcaggccatcttcctgcctcagcctcccaagtgctaggactacaagcacgtgccaccatgcctggctaattaaactttttttttttttctgtagagacagcatcctgctatgtttcctagggtggtcttgaactcctagcttcaagcgatcctactacctagacctctcaaagtactgggattataggtgtgagccaccttgcctggcctttgttttgattctggttttaaataaagtacaactgtctgtacaaaaaagaggtgttttcagaactagattgtctatacgtgatgttcagattctgcctcacaaagcagtatttttgtagaaaaaaattcagtatttactatgagtaaaagtcacactttaaaatcagttacctcatggggatgcttgaaaatattttggtacatatgcttagctctttacggttaaacaaacagattttcaaatgctgcctaaatagaggagtaagaaacactcatttgacaaaaaaaaaaaaccccaaaaataaacaaaaaaaccccaggaaaatgtattgagtgcttattatcagttaagaactaggttgaacagtggaggtaaagacaagtaagtaaacagttgctgtacagcaggatgaagtgtttattagagccacgtccaaggtgccatgggcaaatagagaaaagcaaacaactcaagaaagcaggtgagtgtatattgcacttaggaaaccacatgtggctgagtgtgcttggagcaaatacaggcagaggccagatcatgaagtgctttgtatgtcactttgagggctgaggtttttttttttaaaattttttttttattttttagaagatggggagtttttgaaaacatttttagggaggatatgtgttagagagatccctttggctgcagtgtgaaggataaattggggaaggattaagtttaagggggagactggaagcagaaatgaaactatttaactttgtactaagtacttcagcttaaataagtctgatttttcccctcctagctcataattgtagctgttgcttcttctgactctgccctctttaatggtgggatgattcttggatgattatgatttgaatgcagtttgatttggagtaacctcgaaaagcttaagtctattgtgactggattagagcagacaaatagaatcaaagtgtatttgttctttcaacaactttcttgaattctcaatttgtacatatgacatatcaagacactgctaatctggcttctgctaaactgttttcattaaaactgttctcaccaacgtcaccataacctctttttcttgaagtaatgggcccttttttgatccttgttttcctggatctctctgtagtatacaatactgttgactacttcatccttgaatgttaattttcctttagcttcagtgacacatttggtagtctcctctccttagctatacagccataaccttcatttaaatcacattatttcttacctagactattgcagtacactcctgaatgctttacttgcaaactcacctactctccagatgcagacaaaattatctttctcacattacttctctgtacagccacctttagttgctccccatggcccataagattaagggcaaacttagtgtgtcaaacaagacttgcttcaatatccctgccttgccagtctccagtccaccagtctcttgccactgacctgcaattttttctgtcccccaccgtttttctcatttctccctcccacccactttctctttcccccttttcctcctgggctttgcacaagctgctgcctctacctaaaatattacttctctaaagagtttcccttcctagcagttcctgcctcagtctttcagcatgccagatgtttcatctcctactggaagcgtggattcccctccatccttccaatcttgaatgagtgtcagtactatgggttccttagctttatacacttctgctagcatagcacataatctaatatcagttcacttatgaaggccaccgaaatgatttggatacatttgcttataaaggctttataagatttttaccaaaatgaaatcacaaaattaaaaaaaaattgtgggaaacttgaagatccccaagatcttcagatgccagtgtgagaaacacagccatagaggataggaaatgtaggactcaagtgagagactggaattaaagacatagattaagttagcatattaattttataaatatgattggtaagaggtattgagagctaaatgtgctaaattgttatgataacctaagaggcatatttaacagatgaagaaacatagccacggagaggttaagtgattcacctctggttatacagccagtaagtagatctagagcttgtgttcctagcatctttcctgttgaattctttcacacagaagctatgataccatcctaagccatctatctatattaaatatagataattccttagttgaccttttggctcttggaacactatcaaccaatatgtgatatcaggagtttttattaaaagcatgtagtaattatcatctctattaaataatacctcatgttttagtccttctctgggaatttaacaaccacatcttgtttgaattgactataggtcagttagtgaagtgctgacagtctgagcaggtctggaaacatggcctactgaagtgtagttgacctgcctttgacagttcattgtaactttggaaggattatatccaaatattttaaatgcaaaagaaaaatgttaccttgctcactgtgcaggaatagtaaacaataagatcattcctcttcttttcaaattttttggaagtgtttaatttactagtatgtaggacagaacgtatttacaatcaggtctagataggtataaataaaaggatgaattaaggttaaaaatgtctgtgggtcctagtaaattatattggcacacttttggactgagagtggattattttttctccacgtacagatggattctccatgtacagaagagatagacctggaagcaaatagatacagttcattgtgtataaagtatgtatcgagtactctttgttgatgcaaagagagttagtaaattatttgttttgatctaattcctgtgatgaataaattgtaattttgagtcagaattaattttcaggacctagatataagttattttaccttttttttttttttttttttgagacagagtcttgctctgtcacccaggttggagtgcagtggcacaatctccgctcaccacaatatcctcctccccagttcgagggattctcatgcctcagcttactgagtagctgggattacaggcaggcagcaccacacctggctaacttttttgtatttttagtagaaatggggttttgccatgttggccaaactggtctcaaactcctggcctaaagtgatctgcccatccggcctccaaaaaggattgcaggtgtgagctactgcacctggctagttttaaaaacagtctttgcatatatgccatatggtcagggattttattagttccttaccttgtttgagccatagagctaagaacatacttggtcccttatcttaacattgcatgtcctaaattgtgttttgagagaggataacagatgcatctactaatctttggcctcctgtctttctcccttcttgacatttacacacaaactttgcccatgggaagtttagtgcctttcctagatttctgaggatttgttttgaggatgcttacattttcatgattgcttctttctctgtaatatggttctagtaaatttccgatggccacagtttcctccttatttcttgccattgctgttttctctgtcttccctgcaggcttcatcccacacttagaacaacccaatatttcctctatttcccaaagcactactaatattatgggtagtaggtgtgtactgtaatttaagggttcatcaaacaggcctgccatcttaatgtagctgcatataggattatctgtttacagtgactaggtccttgtatagtcttataccaaacccattggtcaaagagctttggtcttttctagagcttggggataaatacatccatctgatttatggttcagtatgtcattagagacaattttacttgtactgtgccacaatcacagaaaaatattttggagaagatagattgcaggctgtgttatgaaaaacgaatgataactgtctaattgtaattggttggttatagccaaaaattaattcagtttgtcagaaaagtgatttttaaaaatggaaagtgaagaaagttgatttatttattttagctcttcctaccccatactacaaggagaggcatatttacattgtgattaattatagaggacttggagtcagatcaatcattattttaaatatgcctattcaacttcctggccaaataactctgacaaattatttaacctttctgaacctcagttttctcatcagcaaaatggagataatacaggttgaatatttcttatccaaagggctagaagtgtttcagattttttttgggttttggaatatttacatatacataatgagaaatcttggggatgggacccaagtctaaacatgaaattcatttatgttcatatacaccttatacacatagcctgaaggtatttttatacaatattttagaatacttttgtgcaataaacaaagtctgtgtatgttaaactgtcaggaagcaaagatgtcaagtgttgaattttccactcgtggtgtcatattggcacttaaaagcttttggattttagagcatttcggatattggatttttggactagggatgttcaacctgtcgtagagcctatttcacaggtctgttgtgaaaatctaaagaaatgatggccgtctaaagagatacaaagtacttcacacagtgccttatatacagacacatcagtaaatggtagcagaattatactccttagttttaatatttgaaaaaatttttatatgaatgttacaaggtaattatgggtgtttttcaagtcctgtacaaagatatgtgtaagaccaactaacagggtttattctgtgtccttcagctttagctgtgacagtatttacttgaattgcatttaggacaagttgtccaattctgaagttttataataaaagccaagtttttatgacattcttgtaatttgtatgaaccattgaccaaggaaaagaatggttttagtgtacgttaacaatgtgtttttactacattagttgtgaatgtcatacttgtgtcaaaaattgagatgatgtcataagattgtatagataaccatttaatagctgagcatgatttaagaataattgatgtagaatatatgaatttttatataggtaaataacatattaggactgcacaggatgaaaggaattgtacttattagaaatgttttattcacctctacttgcttaaaataaatgttatttttatgtatttgttcagtaaaactgaaatgaaataaggcatatttgaagttagaatttaagttattggggaaataaggttaatttactctcttaaatattttaggacacaattaacagtaactacttgattcagtttgaaatttcatctctactagcaaagcatcaaaagtcatcaaagtcaaaagtcattttgacttttcacaaagtttttgtattatatattttttctcttgactttctgttgagcagtaatagatccaaacacacacacagaaatatatagcttaataaattttgaaaaactgtcacacctgtgtaatagaatccagataaaaaagcagaacgtggctgggtgtggtggctcacgcctgtaatcccaacactttgggaggccgaggcaggtggttcacgaggtcaggagttcaagaccagcctaaccaacatggtgaaactccatctctactaaaaatacaaaaattagccgggcgtggtggcatgcgcctgtaatcccagctactcaggaggctgaggcaggagaatctcttgaacccaggaggcggaggttgcagtgagccaagatcatgccactgcactccagcctgggtgacagagtgacactccatttcaaaaaaaaaaaaggcagcagaatgttaccagtaccccagaagccctcttggcatccctggtaatgaatatagtgaagtgtatttactatcttgacttctagtaacgtggattacttttgcctgtttttgtatttcaggtaaattgacctatatatattctttagtgtttggctgtttttgttcactattatgcttgcaacattgatacataccattggttatagatgtagatgattcattatcattgttatgtaatatttcattgtataaatatgtcacaacttatatatcctatctactgttgatgagcggccttaagtagtttctagtctgggtgttttagtactgcaatgaacatggtaacacatttgtgtgtggtatttttgtaaatagatatctatatatttgtgttggatctatatctgggatattaactgtaaaatcataggatatatgcataggacactgttgtgtggttttcactttatacttccaatagcagtgtatgagagttcttattgctctagatccttgtcaacatttattttctatgtttttaaaaatagtgcataaattaggtcaactggtaatattttcattaatttgtaagatataccatgataaatcaaatttgatagcagtttgtagctaacaatccatgttaagccagcatttgtaagtgaagaaataaaaaatgtaaatgttatggtcatatggccaaggataagaagatggggttgttttatgtagttcctattgagttcatgaaaatacaaatgtatttttctcccatagatggcaacacttaggaacaaataaaccattgtattatgaaggtaatactattattattactactatcactgttaacccttcatcatatgggaagacaaagggaaaaaagtttttggaatgatattctcaaaactacatttggaaaaaaaggtaattttagaaaaatgtctcagaaagtctatttccatatgtgaaatattccataaagcctgtcattttgttgaacatagatattttaaaatcctgcagtataatcttaaagtcacattcaaaataggttgatattaatagtttgcttttgcatcgtagatatgccttattaataaataagattcgtctaatttcttatagtattaataatttaaagatatatcacattaatttttttccaactataacactgatgcatgtttattgagagaaaatatagaatagtataaagaagtaaaatgtgtcaaattttactatccagaaataaccactattaatacttgttttacatccctataggggattttagagactttaaatattatatatagtatatataaaaatatatattttttttattttaaatatatataaatatatatttaaatgtatttatatatttattttaaatatataaatatatagtatatatacatttatatataatatatataaatataatatataatatataaaaatataatctataatatatattacatattatatattatatatgatatataatcatatatcatatataacatatataatataatataatatatatcatatataatatataaatagtatatttatttttgattaatataatcaaaattgacttgacttaagttagttcaagagttttgacatctttaccgtattgtcctcccatctcggactgtggctggttgttagatttattttatcttttccccctgatatttgtcagtacaatttttttattatttattttatctgattattttggtgatataatcaatttgataattgtccaccttactgaagttaattataaaaacttttgagttggttcccttggattttctaggcatatacatttttatgcacactgcttctctgccctttttattccattggctaccacatggcaacaatattaaattagttatcataaggcattcttgattattcccgattttattgggaatgaccatagtattttgcaattcattcaataaatatttattaagtacctactatatgacaggcattattttaaatatgagagataaaatgatgagaaaaacagttataatctaagcccctgagtttacaacctagtgggaaattgtggtcaaagagttatcttaataaatataaaattataattatgtaagtttagcgttgatagattggggcttttgttgtaaatttccttttaaatttggctaattataaggaagcctaagtttccaactataaagcatttaggtccttattagagagagtttgcctgttaggaaagttgaaatgaagttaaagtattaatcacaatgaaatggttattttgtgtttataagcaaagacaaaataaaacctaaacagaaaaacccacctcatctatttttgacccctgtatctctgcttttaagggtctattccctggagttaaatattatagtaacatagtcttccaggagctttgttttggtctttaagagagactaaaagaaaaaaaaaacgtgagacaacagctgcttcggcatttattccatgttattttgagtttttaagcaaatagacaaaataaaacatcaatttctctgcatgatttctttaaaccttttgtgtttttttcttcttgttgactgagcacttaagttcatactttttcatattgctcttttttctttaaaataatttggatgtcttttaatgagtcttttttttttttttttttttttttttttaagacggagtctcactctgtcactcaggctggagtgcagtggcatgatctcggctcactgcaacctccgcctcccaggttcaagtgattctcctgcctcagcctcctgagtagctgggactacaggtttgtgccaccatgcccggctaatttttgtatttctagtagagacggggtttcaccatgataaccaggatggtctcaatctcctgaccttgtgatctgcccgcctcagcctccgaaagtgctgggattacaggcttgagcgaccgcggctggccttaatgagtactttcattgcttctgaagaactcagagggactcaagagcctgttgagaaattcattattaaaactgttaattataaagttactgaaatttcagacttcttaatttgggataaccatctaaataaacaattaacagctggctacaaactacttatagaatgatactgttaaagtttgggggagcaatagttcttagcatagaaacaataatgttcagaaaccacctcctgcctctctgcagatccaacccaatttccattcaaactaagtcagccaaaggggaaaaaatgactgcacaccattcacttcttttgttttccctcctctgctatgccagaaattgctggaaattgtccaaatcaccactgttgatagctgtcatttagtcaatctgtgggatatgtttgagtaggtgatggatgggaatatatgatataggatggggattgggatataggatatatggggatatatggggatataggatggggatgggaatatttggggatataggatgtaggatggggaagaacttttttttttgaagtggactctacactggttatagcttcatgtttgagcttctagctattaggatctcagtgtctttttaaaaatagtgtggggatagacagaaaacagcatttctatgaggatggagtgaaagaacaaatgaacatgagcttttgtaatgtgttaaattatcattttttgttgttatttagccctgcatctcagcgtctttttcttcaatctgacttatcactttgtttttctgatctatattttttttttctgaaggaatttgtgcagtcaaactaaacattaaatccttcaaggaattagaagataattctcaagagaaaataattgccagggagatggatggttgccaacaaattcccttctgagtttatttttttgttttcctactttgagccctgctatccctatttttaaaggaatatcttctgaagttaaatagtaacaaagtcttccagagtctttcttttagtctttgagagagactaaaaaatgcaagggaaactggcagccactgcttgggcatttgttccatgtttttagagatcgtcttctctctttgagaattcttcagtgcacttagggaaacttatattttgtttgttatacatactggtcaactgggttttttaaaaaagagaacagtttttttttccagtctgattataaaaggaatacacatgaatacttaagataggaagaatgtaaactagaataacagaacttcatctctaatgtttgtaagtatatatatcattgtttgttaaagttcagtgtttatgcttctggttattttattttcattgcatagatgtattttgtttttttacaaaactggtgcaatagtacattttaaaatttgaggactgcttacttttttgtttataaatacaatactttttatatgtaattttaaatagctacatgatattcaatcatatacatgaattttaatttatttaatcatcccctcattgttggaaatttaaattattttaagttttttactgttataagcaggctgcgacaaacatcctagcacataaatgtttgtagaaatctttgattattcccttggaggacattcccttaaagtgaaattatggaagcatgaaagttttaaaacttttttaggtacacacagacacacatacacatacatgtatatcttatatctacatacacacacacgcacatacacacacataaccaaatagctctatggaaaggttaaattaatttatatctcaaggtgtaagagtatatatttccctaaactttaccattattaggtttgatgaatttttttatgctttgtctttgaattatacttcaatgttgttttaatttccatttctttgaagacagggagtataccttttggtattaccttctgtaatagaaagcaggatcttacctataaaattttattggcaccaatagggtacaaagtaacttggtggtgggtagccaagaggcattggtgttggggtgggacttgaggagcaacacacgctgaatgtttttcagctaagaaactcagatagccgaagttcaatgtcactgcttctcctcctgaaatttaagatggtggggaatacagatgattgctgaagttcctcagagtgagagaggaactgtttattcaactttcagcatagtacctaccatgtagcacagcacttggcactggggatgtctatggctatggctttggttcttggagttcactcaggacagtttttctgaaactttgaggttttaccttaggcaagaagctctcaagtttctcccccagggctaagatgagagtggggatccattggtgacgtataagccagagcacttctccctttgcatccccagcttcagaagatggactaagccctcacatgctgcttttcatttggactgagccaattaaactgagactgtagaagagggaaccagtttctgggaaagtaaacagcagcgtttatattagtatgagggtcatagggaagtggattcttattctacctgtggttaacaatgaatataaataccctctgctgtagttcagttcttgtaattgcgtggcttgtcagaggtcaattatagtttaaatataagctgaactgtataactatactaactgataattcatgaggcctaggggctggctaatcctcatgtgcaaccttatttggaatattccatgcacttttactttttaaaatttttatttaaataatgagtaaggaggaaggctgaatagaagcccacaccatttgtctctcctgtaggaatacaaaattttaacaactacacaaaaaagcaccatcacaagaaccaaaaatgagatgaggaatcatagtacctgattgtaacttcatattgctgaaagatgcactgacgagggtaggaaagatgttcttgaatcaccaatgccacctcagccccattcctcggcattggctatgtggtacagagaatctgaatttggaggaaggagagcacagtgcctgggtgactcagtaaactcagcgctgccttgtcacagtggtgatcacagctatgctgggctcagccagtacctgtgcatggaaggagcatttggaccagacctagccagaggcgaattgcccatcccagtgttcagaatttgagcttcttagtagacctccccactgagggccagagtgctctggggtcctaggtaaactcaagaggcagtctagctcacaacgactgcagttcctatgcaactcctagtgctagtctgggcttggagccagtgaactagggtggcatatggcctagagagacaccaaatggggcagctaagggagtgcaccatccctcttccaaccccagacagtgcagtttgcagcaacaaaagtgactccttctttctacttgaggagaggagagcaaggagtgaagaggactttgccttgcatcttggataccagctcagccacagtaggatagggcaatgggcagagttgtgaggccccctttctggccctaacaggccaaaagagaacctgcggccttgaaggaaaggacccagtcctggcaggattcatcacctgttgactaaagagaacttgggccctgaataaccaacagtgataccagatagcataccatggaccttgggctctgagatgtgctggctttaggtgttacccagaacatttccagctgtggtggctatggtgaaagactccttctgtttgagaaaaacagaggggccacagtggggtagagtaacaagcaggttcttggacagcatttatggaactgccctgtgcctgtggggagcccactgccctgaagggtgagtcctaggcctggtagcattcaccacaagctgactgaagaccccttgggttttaagtgaacattggtggtagcctgacagaaccccacatgggctggtggtggtagtggccacagggagagtctcctctgcctttggaaaggggaaggaagagaaggaaggactttatcttgtggtttgagtgccagcttaaccgtggtaggcattggtgttggggtgggacctgaggagcaacacatcacgtaaatctctaaggtttttgactacagtccttggatctcagagagcattcctgaactcacctagggcctgggggatctcattgccctgaagggagggacaaaaatctggctggctttgccacctgctgattgtagagtactagggccttgaatgaacataggtggtagccaggtagtggttacagtgggccttgggcaggacctggtgttgtgctggcttcaggtctgaaccagcattgtcccagtggtggtggtcacaaggatatgtgtgtccctataccctcagttccaggtggctcagcatagagaaagagattcagtttgtttgggggaaagtaaggggaaaataataagagtctctgcctagtaatccagacaattcttccagatcttgtccaagaccaccaaggtggtacctttatgagtctgcaagaaccacagtgtttttgggcttggggcctaagtccctttgaatacctggaaagtctttccaacatggaggggcacaaacaagcccagactgtgaagactacaataaatacctaattctttagtgcccagacaccagtaaacatctacaagcatcaagagcatccaggaaaaaatgacctcacccaatgaacttaaataaggtagtagggaccaatcctggagaaacagagatatgtgacctttcagacagacaaatcaaaatagctgtgttgaggaaactcaaattcaagttaacacagagaaggaattcaaaattctatcagagaaatttaacaaagagattgaaattattaagaatgcagtagaaattctagagttgaaaaatgcaagcaacatattgaagaattcatcagagtctcttcttaatagcagaattgatccagcagaagaaagaattaatgagctcaaagacaggctattaaaatacacagtcagaagaaacaaaagaaaaaagtatagaaaagaatgaagcatgcctacacgatctagaaaatagcctcaaaagggcaaatctaagagtattggccatgaagaggagatagagaaagagatggggtagaaagtgtattcaaaggaacaatatcagagaattccccaaacctagagaaagatatcaatatttcagtacaacaaggcagatataacaaaaaagactacctcaaggcatttaataaccaaactccccaaagtcaaagatagggaaaggatcctaaaagcagaaagagaaaagaaacatataacataaaatggcacttcagtacatctggcagcacctctttcagtggaaaccctgcatgccaggagagaatggtatgacatatttcaaatctgatggaaaaaacccctttgccctagaatattatgtctggaaaaaatatccttcaagcatgaaggagaaagaaagaccttcccagagaaagagggattttatcaacaccagaattgacctacaagaaatcctaaagggagttcttcagtctgaaataaaagaacattaataacaataataaattatctgaaggtacaaaattcactggtaatagcgcacagaaaaacagaatattataacactgtaattgtggtgtataaactactcaagtacaaagactaaattaaccaatcaaaaataagtacaacagcttttcaagatatagacagtacaataagacacaaagaggaacaacaaaaagttaaaaagtgggggatgaagttaaggtacatggtagttattagtttttttttcttgtttatgcaatcagtgttgtcatcagtttaaaatattgggttataagataatgtttgcacgcctcacggtaacttcaaattgaaaaacatacaatggatacacaaaaaataaaaagcaagaaattaaatcatgctatcagataaaatcactttcactaagaggaagacaggaagggaagaaagaaggaagagatcacaaagcaaccagaaaacaaataacaaaatggcaggagtaaatccttacctatcaataataacattgaatgtaaatggacttaagtctccaatcaaaagacataaagtggctaagtggataaaaaaaaaaaaaaagctagacccaatgtctgttgcctacaagaagcacatttcacctatcaagacacacatagactaaaaataaagggagggaaaagatattccatgtcaatggaaagcaaaaaagagtaggagtagctatacttgtatcagacaaaatagatttcaagacaaaagctgtaagataaagaaggtcattatataatgataaaggggccaattcagcaagaggagataagaattttaaacatatatgcacccaatgctggagcacccagatgtatacagcaaatactattattagagctaaagagagagatataacccaatacaataataactggagacttcaacaccccactttcagcattggacagatctttgagatggaaaatcaacaaagaaacactggacttaacccgcactatagaccaaatggacctattagatatgtacacatcattttgttcaacgtctgcagaatacacagtcttttcctcagcacgtggatcattcttaaggatagatcatgtgttaggtcacaaaacaagtcttaaaacattcaaagaagttgaaataatatcaagcatcttctctgaacacaatggaataaaactagaaatcaacaacaagaagaattttggaaactatacaaacacatggaaattaaacaatatgctcctgaatgaccagtgggtcagtgaagaaattaagaatgaaattgaaacatttctcaaaacacatggtaacggagacaaaatgtaccaaaacctatggggtataaagaaagggaaatttatagctaaaagttcctacattaataaagaagaaaaacttcaaataaataacctattgatgcatgttaaagaagtagaaaaccaagagcaaataaaacccaaaattaatagaagaaagaaataataaagatcagagcagaaacaaatcaaattgatatgaagaaaacaatacaaaagatcaatcaaataaaaagtttggtttttgaaaagataaataaaatgaacccatatttagccagactaagaaagatagaagacccaaataaataaaatcagagatgaaaaaggagacattacaacgaatactgcaaaaactcaaaggatcactagtagctactatgagcaatagcatactaataaattggaaaatatagttggaaatggatatattcatagacacatacaacctatgaaaattgaaccatgaagaaacccagaacctgaacagatcaataacacattatgagatcaaggccacaataaaaagtctctcagtaaagaaaagcctgggacccagtggtttcattgttgaattctactaaacatttaaaaaagaatgaataccaatcctactcaaactcttctgaaagtcattctgtaaggcaagtattaccctgataccaaaatgaaagacacataaaaaaaacaccaaaaacacaagtacaggccaatatctctgatgaatattgatacaaaaatccttactaaagtacaagcaaactgaattcaacagtacattaaaaaaaccatttatcatgaccaagtgggatttatcccagggatgcaaggatggttcaacacatgcaaatcaatcagtgtgatgcattatatctatggaatgaaagacaaaaaccgtatgatcatttaaattgatgctgaaacagcatttgataaaattcaatattccttcacgtttgtaaaagatctaaaaaaactcggtatagaaggaacgtatctcaacataataaaagccatgtatgacagagccacagctggtatcaccctaaatgggggaaaactgaaagcttttttttaaagatctggaacatgacaaaaatgcctactttcaaccactgttattcaacattgcattgggaattctagctagagcaatcagacaagagaaacaaataaagggcttccaaattggaaagaaagaagttaaattatctttcttttcagatggtatgatcttatatttggaaaaatctaaaagcttcaccaaaaaacaaatagaactaataaacaaattcagtaaagttgcaggatacaaaatcagcatagaaaaatcagtagcatttttatatgccaacagtgaacaatctgaaaaagaaataaaaaggtaatcccatttacaatagctacaaataaaattaaatacctaggaattaaagaagtaaactatctctacaatgaaaactataaaacattgatgccagaaattgaagataacacacacacaaaatggaaagatattccacattcatggattggaagaatcaataatgttaaaatattcaactacccaaagcaatctatagattcagtgcagtccctatcaaaataccaatggcattcttctttacagaaatagaaaaatcaatcctaaaatgtatatggaaccacaaaagacccacaatagccaaagctatcctgaacaacaggagcaaaaactggaagaatcactttacctgacttaaattatactgcagagctatagtaaccaaaacagcatggtgctggcataaaaacagacacatagactaatggaacagagagtctggaaacaaatccatacacctacagtgaactaattttcaacaaaggtgccaagaacatacattggggaaaagacaatctcttcaaaaattgatgctgggaaaaactggatatccatatgcagaagaatgaaactaaacctatatctcatcatatacaaaagtcaaaccaaaatggattaaagacttaaatctgactatgaaactactacaagaaaacattggggaaactctccaggatattggtctgggcaaaattttcctgagtaatacttcacaagcataggcaaccaaagcaaacatggacaaatgggatcacatcaagttaaaaagcttctgcacagtaaatgaaacaacaaagtgaagagacagcccacagaatgggtgaagatatttgcaaactacccatctgacaaggaattaataaccagaatatgtaaggagctcaaacaactttataggaaaaaaatataataatcccattaaaaatgggccaaagatgtgaatagacatttctcaaaagaggacacacaaatgtcaaacaggcatatgaaaaggtgttcagcatcactgatcatcagagaaatacacatcaaaacttcaataagatatcatctcaccccagttaaaatggcttatatccaaaagacaggcagtaacaaatgctggagaggatatggagaaaagggaacctttgtacactgttgatgggaatgtaagctagtacaatcactgtggagaacagtttggttcctcaaaaacctaaaaatagagctaccatcatccagcaatcccactgttgggtatataactgaaagaaaggaaattggtatattgaagagatatctgcacacgcatgtttgttgcagcactgttcacaatagctaagatttggaagcagcctaagtgcccatcaggagatgaatggataaagaaaatatggtaggtacatatatacacaatggagtactgttcagccataaaaaagaatgagatccagtcatttgtaacaacatggatggaactggaaatcgttatattaaatgaaataagtcagggacagaaagacaaacttcacatattctcacttgtgggagctcaaaaaatcaaaacaattgaattcatggagatagagagtagaaggatggctactagaggctgggaagggtagtggggggttggagggtaagtggggatggttaatgggcacaaaaaatagttcaaaagaatgaacaagggctagttttgatagcacaacagagtgactatagtcaatagtaatttagtggcacattttaaaataactaagagtataatttgattttttgtaacacaaaggataaatgcttgaggggatggataccccattttccatgatgtgattattacacattgcattcctgcattaacatatttcatgtactccataaatgtatatacctactatgtacccacaaaattaaaaaataaaattgaaacatttttgatgtatagttttattaattttagttgaaagaaatgtatgctttatttgttacatatacaggtcaacttaatttctaaatattattttttacttttttatttgtgacttttaagcagctgctacctttgtagattctaaaaaatctggatggtattcattttctcctattgtcttaatataattgcacacatttggccattttttgacttaatttttctggaaaaatgacatttattattgaattccagtctttaatttacataaaaattaggcaccagaaagagtagtggagtaaaatagcttatcagtagataatagacatcctcatattttcatgaaatataaatctatacaactttaggagtttcagaggaacttaccgatttattaactttgcgttgggtgaatagctcttttatgatgtgaattctgtatctttaaaaaggatacttgattaagaacagtattcttatttgtagcccaaatttgtgccttttgaataataatggtttattaaacttggtgttgtgtaaaggaagatttggccattttgataaggaaaggttgagaattatttttcaacattcttctctagtttacctttttagttatagaagcaccccatgtttggtttacaataagaatagaaataaatattttatttttacatactgttagtacaaaggcagcagctttttcactactcattttatttttgtaaatttgaagcaaatttatggcatgaaatttccccagcttcttttgaccttgaggtgcaatatgatttgctttgtgaagttttaattttatgacacatcacatttctgtcatgtccaaaattaaacttcagggtaggtgtatatttttctacactgggattatgaacagaataaattatcagagaattatgtttaaatgaatatataagtataggaatgtataggcttagctacatctctctacataaatagcttgttagtgtgcaatcagtcactggagttgccatgaacttggagcttaatgaacaggtggagaaagaggatgaattccagttcaaaatggatctgacagcttatcaggcaatttcactgatcgctaatccagttcgtttggcaacttaatttatcacacagttagaattctcatcccgtgggtttccaggtggaaattaattctggaacatgtccattaccactgggttgaagagacctgcttaagctttgtgaggaaatttagaaataaattattttaaatgcataagccagatttctcttatgattccctttgtgtttatccaattccttcttaaaatatttggatgctgctagcatttgatggtatgcccatggaggtgaactaaggtttatttattcattaatatttataaattaaatggaagaaattgttaatcctaattaattagtgaaataactactataatagataatcctgtgaatataattctatctttaggtatagaaaaattgctgatctcgaacatgttttaagcatttcatagcaacaaataatgaacagaagaaattatttccttaaagctcacaaatctatgtcttctgagtacttacaaattctctaattagtctgatttacagcccattattttatgtaaaagtatctgctaaagcaatttccttgacaataaggaagaaatgcgacttgcctctcacagctcacattctgactctgtttggaattcccaaggatgagtctaattaaatgggcttggcttaggacctggctgtagcttaaaataccttcaaaaccagaaacacattttctccactttttaaagacttgatttatagtgcatagaaagttaaattgaatattgatccttgaaaagcaaatgtgtcctgtaaaaaatgacaacaaaagaatacaataaaagatgacagagtgattgattgtccaaagcctatagatagtagcctcccccttttatgtcatcttctctaggcatctgtagctctgagagggtgatagggatgaagtgttagaggaggattagttgcaccctgacatgaactgttacattttataagaagattgaggaaggtggtaacaaattatttctaagaaggaattttgagaaacgaggaacggggcacaagatcagtaagacctatgatataactccaggaagggacacgacggaatttcttataatttctcaaactctgaagcatcttcaaaaagaatttaagtcagtgaaaaataattgagatgatagaaaactacaaactggcgtaacagtgtcattgattggatatgtcaggaaaattgtgcctatcattcttatgaccaggcttattaaagtaatatcttcataatctagaggggctcagtgttggatcatcctggcatccttctcaaatcccttttctgagtccttggcatttttccctggagcatattgcagacctacaaccttgtcatttcagaaactgtcctttcatttttacctttgaagggaaatggttactgagtccagtactagcccttgggaatcaagccaaaagaaaaaaatggtagggcattgtttgattttctcctcctttcctacaagagcagtggttgcgtcaaaggttcagtgggtattggaatcaccaagaaggagataatgatgatgataaagcacagtggatcaattcggggttttcctcctttttttaaaatgtttttcctattaccatcactgtcactgtgatgatgataatggtaataggaaaaatatataaaacaaaatggggaaaaccgtaaatagacccagtgtgctttataacatttctgatttactatttattactcctcattatttaataaagtgtcccatgtactatgcaaatggcagacagtaaaacccccaccatgctgtttagtgaaatgtgaggatcatgtataaaaaatcctcaagctagacttaggttggatgaagaagacagtgagaaatcttgtctttttaggttaggctttcttgtttttcctttgtttaacttttgtttcttcaaatggcttgcagcttggaagagacaacttttggtctaaaaactattttggttgcggacagaggcagtatcattgaaaaaacagtgtgttcaccaattagaagttcatattgcttttaattctgcttccaacagttttgggacttgaagagtgaaattgagatttgtgtattttttcttcagtgctgcataaatggccatttatggtaaaacctgagaataaaggaagaccaaaaaaagcaaaataaaataagacagaaatacacaaattatagtgattctgatttttccttatgaaacttgagatccagtaagtaaacttcggttggaattattgggcattcaaacattatcattcacataagaaaaaggctccctgtcagtaagccgagatattagatgtgtaaatataatgagccatttgtggagacaccgaccagattgccctgcattgtgatagaattgatgtaatttgagtatcagatggggctgattggtgaatcttgagaagacagttacttgacagcaatgatagattttgaccctgttgtaactggtatacttgaggtaggaagcaattctactcattctgtcaaacggaggcctccactcataaagtgaactattatttagaggatcttgtcttcttggctattattaaaatgcaatttttgtctaatcagctgttattaaaacgcaattaccaaataatatattcttctcactatggtgatttgacagatcaaaagctttctgagggcagagactgcgttatccgtttacgtatctccaatgctttgtatcatgtctggcccattgttagtactcaaaaagtgtttgcggaattaatgaatggttgagtaagttgcttcctataatcaagacttttagttagaatggtggtaaatttagacttagaggattttgtactttgtatcagtggggctgccctaactggtggatttattttttaatgcaatttttttctttttatttaaaatttctttggaagcacagatgatattataaacataataatgtaaataaagtaagaagaaataaattactgattactccaccttccagcagactgtgttgattttttcctgttcatctctatgcatttatatacttttttgtttgcatttttatgacttagaacccagatttgatgtgttatactgagttttctacttaatattaacatttttaatatagtatttaggccaggcacagtgactcatgcctgtaatcccagcactttgggaggccgaggcagttggatcacgaggtcaagagatcaagaccatcctgggcaacatggtgaaaccccgtctctactaaaaatacaaaaattagccagttgtggtggcatgcacctgtagtcccaggtacttgggaggctgaggcaggagaatcgcttgaacccgggaggcagaggttgcagtgagccgagatcgtgccactgcactccagcctggcgacagaacaagactccatctcaaaaaaaaaaaaaaaaaatgtacagcttctaattttacatggctacatagtatattctttactttgtattccccctcaacaatattctatttccctatcgctttatctttctattgaattcctactcagctttcaaggtcccatttaactttgcaacagtcttccaatttctgttgactcttatgatccttgtactttacgtacagtgactatagaacttttgatactttaacttttttctttttatgaaaattatgagaaataaggtacatcagagcatggattacacaactctgtgtcctgatgcctaactcaatgttggtcatgtagttggccctcgacaaatacttgcagataacattctaaggtctgggaatagagggataaatgagatatggtttctggattttatgctcaaagtatattggtaggcaggtaggcagatatcatgtagaaactgaccttctagagttgtttatatggtgctaggaaaaccgagaggaggccagtatattcacagcatagctttttcttcttaataatcttttttcctctactttcaggaatggtatgtgtaggctaaggagttctcacattttcatgactcttcatttcctttggaaattattttctaaaagattccatttcctcatgtttgcttttctcatgccttgtttgcccatgtcacttgctctttttcatttggtatcttgaaatatagtttttcaccacattatataatcttcctacataattgcagcaggcaaagttctaagatgttcctcaagattctccatacttcccccaccaggatacaggccctgagtaatccctggggctataaatttgatggattttacttccatgactaggttatataatatagcacatttaagaaaggaagattatcaggatgggtctgactcaccgtagtcatgattatgactacattaatcctttgaaagtacagttttctctgtacttctggtctacaaacatgtgagctaataaatgaatattgttttaagctgtcgagtttgtggcaatttgttatacagcaataaaagtgaatacaatagtatattaaccatttgtggtatttgctacatatatattttttagtttatcttgctataagttttgtttgtacaaaactcggcttcttcatataattgcatctactgaagatttgtttctttatgatttctagtatttcttcaaagtttagaaggcattaaacagggtattgttggtaggacgcacagaggatttgagtctgagtgtcaaataattaatttgattagactctgccactggcattcttttgcataataatttataaactttcaacctgaacattgactttctccattgctacttagctgaggagaaatacgaattctcctttggaaaagtttggggatttctagaacactaaaccattctttttgatgattgaatggaactttcaaatcttatatttcaacacgaatggggatctcacaatggaaggcagctccctagaactatgctgttagccctttccttcaccataatacttggcaagagacaacttacacagacttttcatttttattctacccttcttccaaattctctggatggtctagcctgtattgcctgttgttttcagtgttgttctgatctcaaatgggcttccacaagtggctagaagggattagttttcatatttcttccattagttcagtattgaactaaaaagcatggttataaatgacaactttagtgactgtgattttttttttttttttttttttagacagagtctgactctcttacccagattggagtgcaatggcgcgatctcagctcactgccacctctgcctcccaggttcaagcaattctcctgcctcagcctcctgagtagctgggactacaggcacccgccaccatgcttggctaatttttgtatttttttagtagagaagggatttcaccatgttggccaggctggtctcgaactcctgacctcaagtgatccacctgcctcagcctcccaaagtgctgggattacaggcgtgagccaccgcgcctggccaaatgactgtgatttttttttttttttttttttttttgagatgaagtttcactcttgttacctgggccggagttcagtaatgcgatcttggctcactgcaacctccgcctcctgggttcaagtgattctcttgcctcagcctcccaagtagctgggattaccggcgcctgccaccacacctggctaattttttatatttttagtagagatagggtttcaccccattggccaggctggtctcaaactcctgaccttcaggtgatccacctacctcagcctcccaaagtgctgggattataggcatgagccatcgcacctggccatgactggatttttaacacccatccacattattggtcactgttggtgcttcaagtgtttctgtaacattcctggattgacactaaaaaaaatcctaaacaagagaattgttactattatggatacatttgttctttcaacttacaaatattaaggacctactgtctgctagctctgcaggcctcgccattttttgccttttccatttgacacttatatgtcaaatagcctgtgctaagaaagtccttaatgctacaaaggaaagtaaatgtacttatatttgttgcctgacttaacaggaatatataggcaaaagctagtagttatgctgaatttaagacagtatgtttggtctaatatccagaattcacaaggaacttaaatttataagaaaaaaaatgaacaaccccatctaggcaaaggatatgaacagacacttctcgaaagaagacatttaaggccaggcacggtggctcacgcctgtaatcccagcaatttgggagtccgaggtgggtggatcacttgaagtcgggagtttaagaccagcctgggcaacatggtgaaaccccttctgtactaaaaaaaatacaaaaaattagccaggtgtggtggtgagcacctgtaatcctagctactcgggaggctgaggcaagggaattgcttgaacccaggaggcaaaggttgcagtgagctgagatcatgccactgcactctagcctgggtgacaagagtgagactccgtctcaaaaaaaaaaaaaaaaaaaaagaagaagacatttatgtggccaaaaaacacatgataaaaagctcagcatcactgatcatcagaaatgcacaacaaaaccacactgggagaccatctcacaccagtcagaatggtgattattaaaaagtcaggaaacaaaagatgctggcaaggctgtggagagataggaacacttttaatctgttagtgggaatgtaaattagttcaaccattgtggaagacagtatggttattccacaaggatctagaaccagaaataccatttgacccagcaatcccattactaggtatataaccaaaggaatgtaaatcattctactataaagacacatgcatgtgtatgtttattgcagcactatttacaatagcaaagacatggaaccaacccaaatgaccatcaatgatagactagataaagaaaatgtgatatatatatatatcacatgtattatatatatatatataatggaatacatgaaatcagaacaccatggaataaaaatgaatgagatcacattctttgcagggacatgtatgaatctggaaggcatcatccttagcaaactaacacaggaacagaaaaccaaacaccacatgttctcactcataatgagttgaacaatgagaacacatggccaccgagaggggaacaacacacaccagggcctgttatgggtggggggtgaggggagggaacttagaggatgggtcaataggtgcgacaaaccatcattacacatgtatacctatgtaacaaacctgcacgttctgtacaggtaccatttttttttagaaggaaaaaacagtatttttatttttataatgtaagtgtgtgataatttgtttaaatctaatattgtttctattagcttaagttaagcattgagacaaaaattggaagcatggaaatgagaaaactctagtaacgattctgtcaggggtgcatagtcattgtgtatagattaggaggtagaaagtgatcccgtcttatgattttaaagtttgaaaggaactgaaggataatccaggccaaatgcttcatgtcatagatggggaaacagagtcctagagagaggaaataacgtactcaaggacgtggaggtcctatgtggcagaaccatgcgtaggaccctatttcctgttactcacttcttttcctttccttgatttgggttgctttgttactggtacttaataattcggtagaaacttgacatgtacttcatgatattaaattgatattgtaggttggactctggaggggttttaggactccttgtcttttctgtgggattgaaacaatatggtttctattaaaatattcagtgacccttctatcttttgaagtatttggttagatgaaatgtggatagtaaccaaaacctctataagtagtattatactttggtctgattgaattactgagcagttttgtattattcttgttgagtatttttggtttgttggtttgaaaaaggaaacagttctacagatgtgtttttttctagtaacttctgactgcttttctattgatctcctttttacgtcaaataataaagctaaaagaagctttgttatgtcttttaacaaaatattgatcttttattggtatgaaaacatcttggttgttaaattgcttcattaattttatacctcttttatattgaagtctgtaattgtttggtgtaagagttactccagttactgcttgttttaaaattgattttccttttaatttagagacataaatgaatcattttttcccctttaatttcttcctgctatataaaagacattaaaacttttttaggctatcaataatattacataggtctttttggataatacagtcctatgttgttggtgaaggttctaaacctgctagtcttgcctagtttcagatattgtctggtaaaataacatcactatattatgcatgcagctactccaatacatatggaattcaggaaacttggatttgaattgtctctcttttagttattatctgtggcaagtcacttagctcctctcagtatctctgtttcctcatcttttaagtggagacaataagatttttagagtccttgtatggactaagtaagataaagcatgcatccctggcacattgtcaatgctcataaatagtagctgtaaaaatactgcacctagggtaaactatagaacagtatatttattctgaaacattattcctgttagctattatttaattcacccagcttactttcctcatcagttaatctgtaacccttttctccttatataaaagacttggaattatttcattgagggaggtcaataagaagattcccaaggaggatctgattaaagagtatctattttccccatgataagatcaataattccttctcaagggggtgtcagaacgaatatttgaaaattaccttccaacaaactctttctttgcttctgggaatagtacatatttggaaaggagacaataaatagatgggcagtatcttgtgcaggagttctgaacaactatagaatgcttccatctgttcacttttcagttttgttctccttgactttcctatcttagactcctgaggttgttagatgcacccctctcatccacacagtgactgtgtctatctatctggcccataaaactcctttccagtatgtgagaaatacatccgttatacaggattagagacagtggcatcgtcttccacactgtagtttaactcaggcctggcaccaaactagtgttttttgatgaggttgttatcaggcaagagaatgaagctagttctgtagtatggtaccacagagaaattagcctgtttcatgaacaaatgcagataatagggtacataatttttagtacttgaagcatagccatgagtgtaatctgattgtcggaaagtatacaattcttaacctatggcccttattttaaccaaacatagtctgaatgttacaaaactttaaattatttatagaaataaagtcattttatcattgattatctgaagctcctgtttttgtccttgataaatcatataggacctttagttacctctccaatttgcactctctctgtatttctggacatatcaacaaactatttctcagctgctatgtggcattggtcatactgtttctctcctacccaaatgctccttgctgaaggagcctcaccttcatcagcactgcagcatccatggtaaagatgtagggaagacaactaagaccccagctccatgcttcacctggtcacctaggccctttgaagaaatcttgcagtgcggcataccattagtctcccttggacaagaaaatataaagtcctgcctccctagataccagcctacctaacgaagccttctaaaatagtgggctttagaaaatcaaatctcgtatctgaagatagtggtaatcatcaatgtttcagaaaggtagcatttctggcccttgagtgcacttataaaggttgatgaatgtcagtggtttctggcaggtttaatgcttaggcaagggaaggaagggaggaatcaaggaagaataggaaatagtgaagagagtaagtaaacagtggggaaataaaaatatgtctgtgatcagcagtggtaaaattcccctgaaatttgttagagatacaacttagtagttgcctgaagatgcttatctttccctagtggtatttaaaatctctctctcctgccactagcattttagttctttctttcttctttcatgtatgtttaatttttgaaaataattggagatttatggtagtatcagtggtattttttccattttttttctcttgaactatgttttctttgctccaaaaagcaaatggcagtcttcaaaggacgatttgtttctatttgtataaattgagtataagctgcatccaattcctagtgcatgcataaaactctttttgaggaaatgtgaccaatatataacattttattgaatgtttcttgaaattggtgtcaaactgttttttatttcatttcttttgggatgcctaattgaattgaaacttcattatttcattccatggcttaggccacctttagagggaatataccatgtgagctcctacttacccattaagaccagatatccactagggacttaataggctaatgtgttcctctttcacctcctatgtcctaaatttagcattagctaaattgactaattaaaataaccctagccttattcctcttcctagtggatattgttttatttaaacatttcatcacagaacttggtacaattgttaggcacttcttacatgatcctggaactgaaatgtcagatgcgtgtagggtattataacctaaccaaccataatgagataccaggatggctatgattaaaaataaaggaagtggtgagaatggaataaaaagtgctgcagaggatgttgagaaattggaacactcaaacatggctggtaggaatgtaaaatggtggagccactgtagaaaacattttggggattcctcaaaaagttaaatataaacttaaccgtggaatgacccagccattccactcctaggtataatgcccaagagaattaaaaacatatgttttcgcaagaactttcacatgaatgtccatagcagcattttttgtcatagcccaaaagtggaaacaactcaaatgttcatcttctgacgaatggatacacaaaatgtggtctatccatacaatgaaatattattgagctatagaagggaatgaaatactaagatatgctacaatgtagatgaatctcaaaaacattgttctgagtgaaagaagccagacacaaaaggttacatattgtaggctttcatttatatgaactatccagaatagataatggaggcagaaagcaaaatggtagtagccaggggatgacagaaggaggggatagggagtgactgtttaatggatatgagatttaatggatctgagatgaaatgtcttgaaactagataaaggtggtggttgcacaacattttgaatgttctacatacaactagatttcacttacactttcaaaaggttaactttatgttatataagttttacctcagtaaaaaataagcaaactcacagaatttagagtgaaattctaaaatcttgacagccacttgctcccttcattttttcgggactaatcttgtataatttcaggcttaggctaccttgttggggtaagatcagttttaaaattcataatgctttttttctaaaacaaagtgttcagtaaagataaacaaaaagaaaaattagaatcaccataattgtaccactcagaacaattcttaatatttttgtatgtgtatttcctgtgttttttccagtgtgtaatatatgtacacatactctatacatgcatgtacatatttgtgaaatagggtcattttgcatatagtgtttataacatacttttatcatttaatgatgcattagaaaattatttggtctattttctatagtttcacaagtatacagcataactcttttaaaatatgtcttcagaaaaaaaaatagcagcaaaatagggtaaagatcatgtttcatttgtttttgaatccctggagttgttcaaaagaaatagccactttattggattgggttggactggattggattagattgaattaaactagaataacttctagaaaccaatgaagaacttctgaaatattcaacatcttgttttgttataatactctcttagcttcattttagttggtgacttgatatacccctttttcccttcagggtgtcaggattgtagaagcctgagtgttacgtgaagcaaatgtccccatgtattctgttttagtttactatagctgccacaacaaaataccatagatggggtgacttaaaaagaaaactttattttctcacagttctgaagggtggcagtccaagatcagaccagcaggtttagtttctcctgaggtctttctccttggcttgcagatggctgccctcttgctatggcatcacatgtccttttctctgtgcatgcgcttccctggtgtctgtatgttctcatctctactttttataaggacatcagtcaaattggatcagggcccaccctaatggcgtcattttaacttaattacatctttaaaagccctatacaaataaaataaacacattctaaggtaatgggggttagggattcaacatatgaattttgggggtccatgtaggcatacctcatttattgtactttgctttattgcgttccatagtgtgggtgtgtgtttgttaattttttaaagcaaattaaaggtttgtggtaaccctgtgctgagcaaatctgttggcactgttttttccaatagcataggcactttgtgtctccatgtcaaattttggtaattgtaatatttaaaagttttcattaaaaatttaaaacattttcaattattatgggcacataatagttgtgtatatttctttttcattattattatatctgttacagtgacctgtgacaattggtctttgatgttaccattgtaactgttttggggtaccaccaaccgcacccatagaagacagtgaacttaatctataaatgtgtgtgttctgactgctccatcaactggctgatccccagcctctttccctgtcctcagggctgcttattctttgagaaacaacagtattgaaattaggccaattaataaccctgcagtggcctctaagtgttcaagtgaaaggaagagtcacatgtctctcactttcaatcaaaagctggaaatgattaaacatagcgaggaagacatgtcaaaaggcaagaggccaaaaatgaggcctcttgctccagttgggagagttatgaatgcaaatgaaaagttcctgaaggaaattaaaagtgctactccagtgaacacatgaatagtaaggaagtgaaacagccttgctgctgatatagagaacgttttattggtctggatagatgatcaaatcagccacaatattcccttatgccatagcctaattgtaaggccctaactctcttcaatactgtgaaggccaagagaggtgaggaaactccataagaaaagtttgggccatagtgtgcaggtagctgtccctacttgcttcttgctgaggctgcctcagaacccctttccactgcttcatgattttctgttgtctcttggcaaaaatggcaaataatgatgctgttctgaagaggctggagcagaaggaggcagaggtgggtcaaatcattgaatatcttaagcagcaagttgctctacttaaggagaaagccatttttgcaggcaattttgagggaagagaagaaactttgagtaggaaactgaaggaagaagttgaattgaaacaagagctaattcagacagaaattcaaaacagaatgaagcaaataccatttccatctggtattccactgcatgctaattatgtggtttctgaacgtgatacaatctacaccagtaacaaccacatcttctggtatcaaagaacagataaaaggaggagcaggagaagaagagaaagcaaaagagaaaattgaagagaaaggagagaaggagaaaaaacagcaatcaatagcaggaagcaccaactctaagccaataaatgtttcccaactagatctttgaattggttgcatcataaatgtcagaaaacaccctgatgcagattctttgtatgtagaagacgtagttgttggggaaatagtcccaagaacagttgtcagtggtctggagaatcatgttccttttgaacagatgcaaaatcagatggtgattttactttgtaacctgaaacctacaatgatgaggggagtattatctcaagcagtggtcatgtgtgcttgttcaccagagaaggttgaaatcttggcccttcctaatggagacaattacttttgatgctttccctggagagcccaacaaggaaccaaatcctaagaagatttgggagcagatcccacctcatttttatactatgatgagtatgtggctatatacaaaggagctccctttgagatgaaagggaagggagggtgtagggttcaaactatgaacaacagtggaataaaataaaacaaaatgccttcattatggaaatacattggagaaaaccttataaaaaggaatgtatttgccacttgtacctaaaaaaataataacaacagcaaagtttgaggctaccagaagtttatgaggtttaagaaaagaagctatgtccataacataaaagtgcaaggtgaagctgcaagtactgatgtagaagcttgaggcaagttatccagaagacctaggtaagataattgatgaaggtggttacaataaacaacagattttcagtgtatatgaaacagccttttactagacgatgataccatttaagactttcatagctagagagaagaaatcaatgcttggcttaaagtgtcaaaggacagggtgacactcttggtaggggttaatgcagctggtgactctaagttgaagccagtgctcattcaacatttacaaaatcctagggcccttaatattgatgctgaatctactctgcctgtgttctataagcagaatcacaatgcctggatgacagcatatcaatttgtggcatggcttactgaatattttaggcccacttttgagaccagctgctcagaaaaaaagattcctttcaaaatattacttttcattgacattgcaactagttacccaaaaattctgatgaagatgtacaaagagcagtcatgttaacacaacatcaattcttcagcccatgcaccaaggaataatttcaacttttaagttttattatctaagaagtatattttataaggctataattgccatagatagtgtttcctttgatggatatggacaaagtaattgaaaagcttctagagaaaaaagtaaccattctagatgccattaagaacacttgtaattcatggaaggaggtcacaatattaacacgaacagaaatttggaagaagttgattctaacccttgtggatgacttcgaggtccatccaagttcaaggcttcagtggaggaagtcatagcagatatcgtggaaatagcaagaatattagaattagaagtgaaattctaaagatgaactgaattatttcaatcttgcaataaaacttgaactgatgaggaattgcttcttatggatgagcaaagaaagtagtttcttgagatggaatctagtcctggtgaagatgctgtgaatattgttgaaatgacaacacagaatttggaatattacataaacttagttgataaagcagagcagggtttgagaggattgactgcaaatttgaaagaagttctactctgagtaaaatgctattaaatagcatgacatattgtagagaaatctttcatgaaaagaagtaaatcgatgttttaaatttcattgtcttatttaagagattaccacagcaaaaccaatctttagcaaccactaccttgatcggtcagtagccatcaacatcaagccacgaccttctaccagcaaaaaaattatgacttgctgaggactcagatgattgttagcatgttttggcaataaagtattttttaaagtaagttatgtgcattgtgtttttagacataatgtcattgcacatttaatagactacagtttaatataaacataattttatatgcactgggaaaccaaaaaatttgtgtgactcgctttattgcaatatttgttttataaaagttgtctggaactgaacctgccgtatctttgaggtatgcctgtaattcggtgttcataaaatatacccaactgaggaagacaatgtcattgtgtctacaagaatcttaccatggggactcagttaaagtgagtcacccaaatctatcaagaggtagattttcttacatttttatgaatggctctgattagcagaggagaaaattgataaaaaatatgtgtggcaagaatagtagaaaaaatgttggacattttttgtttttaaaccaagaaaatatctaggctgggcacggtggctcacacctgtaatcccagcactttgggaggccaaggtgggtggatcacctgaggtcaggagttcaagacaagcctggccaagatggtgaaaccccgtctctgctaaaaatagaaaaattagccgagcgtgatggcgggagcctgtaatcccagctactcgggaggctgaggcagagaattgcttgaacccaggaggaggttgcagtgagtcgagatcacgccactgcactccagcctaggcaacagagtgagactctgtctcaaaaaaaaagaaagaaagaaaaagaaaatatctaccgttagcataggaaaattcattatagcagcatattcccactattttaatggcctgaagagaaatagcactatattagcagttcataattaacccataagcagggcttgttgatcagtattttttgggaaaagaaggcttcacagtcgggattttttggtgctaaacagaagatactcctttcaaataaaagcaaattgggataaatttgtcattttttggagataaattatgaacattttagattagtagaatcttcctaatgatgaattccatttcaaggacaagttttgtttaaattttatcttcaagatctgtgaatatagaaaatttaaaataattgtgttttttttgtttttttttttttttcttgagacaggctctgttgcccaagccagactgaagtagctcaatcatagcttactgcaaccttggacttttgggttccagtgctcttcctgcctctgcctcctgaatagctgggactgcaggaacgtgccaccacacctggctaattttaaaaaattttttagtagagacagagttgcctgggctatgttgctcaggttatggaagattttttaaaacctgttttcatattggataatgacttctttaaatgtatactcttcacttgagcaggggataaagagttgttttctgaagtttggcttgagaaaacaactgtttgggttttaaaatccaagtggaaacatgttacaaatgaaatttttttttatttctcttatttaaaacaaacatagtttatagcttttatatattaacaatcaaatagcagaaccatctacatttatccaaaataagctagattagtttgtgtgtattttcatgtaagtcaaataggcatttgcttatgaggagtcatttaaatgcagctttacaagaagtggtacaattgtctgcaacatttctttatctcaaagtaatttggatgaaataacatcagaagatgtcagtttaaatgttccacttgaaatccggttagtttttgattattcacactaatggaaggagagtgtaggcatgtagactccgaagagacctttaatccaaaaattacttcttagcatttgaagatatttgggtaatacatttggataatggtgtgtttcatgtcctttggcttttttaatttaaaaaattttttcagagacaggatctcactctgtcactcaggttggaatacaatggcaccatatagctcactgcagcctttggtttaagagattctcttacggtttaagagattctcggccgcgcgcggtggctcacgcttgtaatcccagcactttgggaggccgagtcaggtggatcatgaggtcaggagatcgagaccatcctggccaacacggtgaaaccccgtctctactaaaaatacaaaaaattagctgggcgtggtggtgtgcacctgtagtcccagctgctggggaggctgaggcgggagaatggtgtgaacccgggaggcggagcttgcagtgagccaagatcacgccactgcactccagcctgggtgacagagcgagactctatccaaaaaaaaaaaaaaaaaaagattctcccacctcagcctccagagtagctaggactgcaggtgtgtgccaccacacctggctaattaaaattttttttttgttgagacagggtcttgctatgttgtctaggttggtcttgaactgctgggctcaagcgatcctcctgccttggcttcccaaaacattgggcatacaggcacgagccaccatgccagacccttttggctttattgacagcctttgaattttaagtaaatgctgaaatgtatgtagcttactggaatatatataggagactttatagttctttctttagatctttggatttccttaagagacagagcactttacaagaccttttgtttctcaaatatacatataaacagcaacacatttgaaagataaattccaactaatgattaatgttctttgcagagaatgacaaaatacatattaattacttagggttctatttgtattttactttcatagttagaaatctgtttctttttctttcttttttttagaggcaagattttactctggtgcccaggctggagtgcagtggctcaatcttagctcacttcagccttgaaccccccagcctcaagcgatcctcttttctcagcctcctgagtagctgggactacaaaaacatgccactgtgcctggctaattatttttatttttatttgtagagttggggttgctttgttgcccaggctggtctcgaactcctggtttcaagtgatcctcctgccttggtctcccaaagtgttgggattataggcatgagccactgcacctggccagaaatttgtttaagtaaaatgactgtatcagtcagggttctccagagaaacataacatatgtgtgtgtgtgtgtgtatatgggactggctcacatgatcacatgattatggaggctgactagttacaagatctgcagttggcaagctgaggagggttgttagcctttttgttttattcaaaacatcagttgattggatgaggcccatcccattaccctgaataatgtttgcccaaatgtctgggcaccttttggcccagtcaagttgatacataaaattaaccatcacaatgacctaccttaaagttcttagctggacattttgcatttctcatcaggaacctaggctaatttacaacctttgatattgatttcaaccacagtacagttaatgagttatcagtgatgacaaatcatgatcatttccaatacaaatattaactctgattatttgtaaatatgttatttttcccacattgttctagacagtgggacatagaggtaaagtaggtaaaggtgctcacctcctgtaacttatattccagtgggagtgacagataatgcccaataaacaaataaatgtatattaaaatgtcaggtagtgataagcataatgaaaaaataaaacacagtaaagaggtaccatttcagataggtttgttaggaaaagtcctgaatgggtgacatttgtacagagatgtgaataaagtgaaggaacaacttatgtataccttgataagcacatatctaactaacatttttggcatggtttaaggtctttctttcatatatctgtattttgcatactgtggtgctactcagatatcccttctatgaaagcttgttgccccaacttctgggaatacaatgggcaggtaccccacagctgtcagccccttcagggactctctcagctgcagggcgccaacttgactaactaaggtaaccctccttcccaggatggcccacagtcaatgactgattgctgtggaaatatagagtcctatctattttggcccagctagagataactctgaagggccattctaactccagagttccctgcgggatgagccaagactgttggtagatttggatgacagtttaactttttcctctgtccaaacctgtttcattcccctcccttttcataggtttgatcccaaaggtactccttaatatacctcctgctaatcttggtctagaggtctgcttcccagagaactcaccatttaatatgaagttttgtgaacctacagcttatttatgatcttatctcagtagtacttggcagctggttttatatcgggccacggtctgcttcctgacagaatcttacatgttaatatgaacctttcttttctgactctagcactctgaaaactgactttatacctaccacacagtttggaaattgttaaaaaggttatgattcccctaaccactttgatcttattatttcactgagagatattttagaagcattggtttatcttcactacctacaggagtctaatatattgttttatttaactagagtctggtcaacattaacctctttttcgtttataaagagaatgatacggctgggcgcagtggcccacgcctgtaatcccagcactttgggaggccgaggcggacaaatcatgagttcaggagatcaagaccatcctggccaacatggtgaaaccctgtctctactaaaaatacaaaaattagctgggcgtggtggcgcgtgcgtgtagtcccagttactcaggaggcggaggcaggagaatcgcttgaaccaggaagtcggaagttgcagtgagccgagatcgcgctactgcactcccgcctggcgacagtgagactccgtgtcaaaaaaaaaaaaaaaaaaaaacagctacaaattcatgtcaatgaatagggattttcaaattatcttcatgctgcaaaaggagagaaatcactttataacttataaccatgaagctatttccattaaatatttaagaaacgcaaaattcttggtaatggcaacaaagttaaacaagttaatatgggggatttttaaaagcaactatgtttaattatttcagggtttcatataacttttgaaaaattaatatatgatataaattcccatttactgtgtaattggtattatttatgaaagaacttcattcttcctgtatcaagaaacatagggattagatttgtaatttacataatctataagcatcatcatgaattcttttcaaacctgacaccaaaagtattttaagaaatctccataccaatatctgtcatggacatagatatacacattctttataaaattttagtatatgaaatacagaaatatatacagtgataataaatcatgatctagtagagaatatcccaagaatttaagattgattaaaatttgaaaatcagtgtaattaatcatattatcaggcttaaaattaaaaaccagccagatgctatgtcacagtgctttggaagattcagataggagaatcacttgaggccaggaatttgagatcagcctgggcaacatagggagactctgtctctacaatttttttttttaaataaattagctgggcatggtggaacatgcacctgtagtctctgctattggagaggctgaggtgggaagatcacttgagcccaggagctcaaggttgcaatgagctatgattgcatcactacactccagcttgggtgacagagcaagactctatctctaaaaaaagaaaaaccatatattcctttcaataaatacaggaaaagtggttgacaaaattcactatttgctcatgataaaaactcagaaatctagtattagaagggaacttaagattccctaccattgatgtgaatttgtgtcattctctttataaatgcaaattggaagggaactttagggatatctctgaaaaactttcagttaacattgtacttgatgaaagactgaatgctttctcccttagattggaaacaatgtaagaatgtccatgctcaccatttcaattcaacattatgctggtcctagccaatgtaataaaggaagaaaaataaataaaaggcagaatggaaggacataagtaaaatagtctttatctacagatgacgtgatcttctattagaaaattctaaggattatacaaaaatgctgctagaacaaataagtgagcttagcaaggtctcaggatacaagattaataaagaaaaatcaatcctatttctatatagtagcagcactcagaaatttccatttccaagtgttattttattaaaaaaaacaactcaaaatggatcgtagacttaaatataagcacaaaaaatgtgaaagttttagaataattcatagaggaataaaaagctggagttagccgggggcagtggttcacgcctgtaatcctagcactttgggaggccgagacagacctagatgtaaattccagacttgcacttgaatcacgttcttgctacatattatctatgcaatctctgttaaattatttagtttttcttagcctcactttcttacctataaaatggagataatatctgctaggaactgttaatgtaaggcagcggttctccaagtacggtgcctggaccagcagcattagcaccacctagaaatttgttagaaatggaattcagacctactgcttcaaaaactcagggtgggtcacagtaaattgtgttttgcctttcaggtgattctgatgctcaagttttagaaccattgatgtaaggattgtgtgtattgtgtgctgagtttcacagtgtttgctatgtactaggcacataattaattttaaaaacaaatgtctaccccagcaaaccttctattctcttcccttacactatttcttccagaaatgctttccccatttttctgaaccttaacattctttcaggacccaactcaaattccatctgcccccagaattcattccaaatcataataattctctatccccaaaacatagcacttaatagctagaactgttggtgctcactggtaaccactagccacatatagctattgagcacttgaaacatagctattatgcattgagatgtgctttaagcacatctcactggatttcaaaggcttactacaaaaaggggatatacagtcgactcttaagcaatgcaagagttaggggcacagacgttctacacagttgaaaatgtgtgtataacttttggctctttgaaaatttaactactactagcttactgttgacctccagccatactgataacataaacagttgattaacacatgttttgtaggttatatgtattacatactctattcttacaagagtaagctagagataagaaaatgttattaagaaagtcataaggacttataaggaaatgtatttactatccattaaatggaagtgcagcattataaaggtcttcatccagtgagttttatactttcatatgttttcatgttactaaccagcatccttttgtttcagcttgaagaactccctttagcatttgttgtaaggcaggtctagaggtgattaactattgtttgacaaaggcaccctgaatacacaatggaaaaaggatagtttttttcaaaaatgatgtcgtgaaaacttcatatccaccatgaaaataagagaaatcatattcttatcctacatcatatacaacaatcaactcaaaatggattaaatatttgagcatataacctgaaactgtgaaactcctagaagataacatagggaaaaatctccatgacattagttttggcagtgatttttaggatattacaccaaaagcacagacaataaaagtaagaataaacaagtgggactacactaaactaataggtttctgctaagcaaggaaatagcaaagtgaaaaggcaacctatggattggagaaatatttaaaaatcatgtatctgataaggaattaatataaaaaataagaaacctgtacaactcagtaaaaacaaaacaccaaagatgggcaaaggacctgaatagaaaactttccaaaggacacatacagatggccagtagttatattacaaggtgctcagtcatcagggaaatgcaaatcaaaaccacagtgagatatcactgcatacctgttagaatggctattataaagaagagacaaaagaaaacaagtgttggtgatgatgtggagaaaagggaaccttatacattgttgttgggaatgtaagttggtacagccattatggaaagaaaacagtatggaggttccttgagaaattaaaaatagaactcctatatgatccagcaatcccatttctggggactcatctgatggagatgaaatcagcacattgaaaatatatttgtacttccaggtttattgcagcattattaacaatagccaagatatggaaactactgaaatgtccattgatggatgagtgcatacagaaaatatgctatttatatgcagtggaatatcattcagcctttaaaaaaaaggaaatttctgttatttgtgacagtagtgaaatacattatgttaaatgaagtaatttaggcacataaggacaaatactgcaggatctcatttatatgtggaatctaaaacagttgatctcatagaaattttagagcatgcaatttagtatgtacagcatggaatagtgattgccggtggctgggtggggggaaaatgggaagctgttggtcaaagcatagaagctttaagttataaataaattttggagacctaatgtattgtatggtgactgtagttaataagaatgtacttgaaatttgctaagagaatagatcttaagttttccacacacacacacacacacacacacacacacacacacacacacggtaactatgtgagattacggatgtgctaattagtttgattgtggaaatcattctacaatgtaacatatatctaaacatttggtacaccttaaatatgtataatttttatttgtcaattatacgtcaataaagctataaaaacttttctgttctgaaggaaaacataaataaagattatattttagaagagtaataagaaataaattttcctggataatttcattgttttctctacaaagaaaggaagaaaataccttttccattaaaaacaaaaagaaaatatctgatgtgcttagtgattctgagaagtcatttatgataaacacagcaaaataatataaatattatgttacctctttatcatttagaatatttttgagtttggcattatacatagtctcaaactcctgacctcagatgatccacccgcctcagcctcccataactgctgggattacaggcgtgagccattccgcccagccgccctttaatctttataacaaatatgcatcataggtgttatctccttttatagatgaagaaaggcaaatgttaagaccaaaacaaaactagcaagtggcagagctaagattcaaacacagatatttctgactccaaaacctatgtttttaactgtactgcaccatagagaaaactggttttactcatctgttcctattttatggatggggaaatttccccatacttatatattttatgtagaaataagaattgtaaacaattttttaagctgtaaggtgacattattgatttgtattttttgcaatagtggtataatttcaatactcctgtaaagtttgaggctctactattttgagataaacagaatataaaggacaatatttaatcaaatctgtgaaatagtaaacagaatattttgtaacagttttcatatgcacagcatattacaagaaagtcttgagttacagattgaatattcccaatccaaaaatccaaaatctgaaatgcttccaaatctgaaagtttttgagcaccaacatgacactgtaagtagaaaatttcacatctgacttcatgtgaagggtcgcagtcaaaatgtaggcacacaacacaaagcatctgcaaaggaaaaataaaattgtctttaggctttgtttataaggtatacacataaaaaattaatgtattaagtgtttagacttgggtcccatccccaagatatctcattttatatatatgcaaatacgccaaaaatctgaaaaaaatcaaaattcaaaacacttctgtctcaagcattttggataagggatactcaacctgtagtaaggaagatgcctgtagttgataaaatattaagtttggtgggatttaatgaaataaaaatactgtgacatgattcatgcaaagtggtttgtcatttactaggattttgaccatttctaggtaaactctggctttcttacagagtagatgttcagaatatgaatttgcatttactgtttttaaggaatgatcactgctttcattacactataaaaacatgtaaatgataaactttttaatgtgaagaggtagttttttctgttattagttgtataaacaaatgcctgaagatatagttgtaagaaggttcccaaaccaatattcttatcttgattctgagcatagcatttgatttggcctgattcatacaactagaaaggggttaatgtttatatagggtgagagctctgcctataattgttacatatcttgcagatgaaccctgtatttttaatatacatatacccatatctttttagtcttaatgttttaaagtatcaactttcttttttctttttttgcttgagagggtggtaggatagagcttgtgtgtacctcagctccagctgctgccgaatgacttccaaccaacacctgtgggtgggagctggctggttttcctttcattgtcaagcctgggcatactaagggaaaatgcacctgccagagacctctttattttcgaaatgattatcagtggtatcggccgagagagaggcagctggtgggctcctgtaccctatctagccctctatatggatctttccttctatgttggaaaaacaaagttgaaatttaccacattttggcattacacttggcagttactgtgatgaagttgatcatattagagagtcattcaggatacctgaccttcctgccttccgctaccttaagtgaaaaatctcttctgttccctaatttactgtagcatatgcttcagtgtgttgtgttgggtagggcagatatccttagactaattctaatcctgagtgattcaagactattccagtggcaatggaattttacacctatttagtcatttggaacagagaggtatctgcttgtaataggccaagacaccttaattcctcatttatccattagctacctgtggggctttatctaagacacttcagtttcctcatccataaaataggaacagatgggtaaaaccagttttctctatggtgcagtatggttaaaagcataggttttggagtcagaaatatctgtgtttgaatcttagctctgccacttgctagttttgttttggtcttaacatttgcctttcttcatctataaaaggagatacacctataatgcatatttgctataaagattaaagggcggctgggcgcagtggctcatgcctgtaatcccagcaatttgggaggctgaggtgggtggatcatctgaggttaggagttcgggaccggcctgtccaacatggtgaaaccccatctctacaaaaaatacaaaattagctgggtgtagtggcacatgcccgtaatcccagctactcgggaggcggaggcaggagaattgcttgaacctgggaggcggaggttgcagggagccgagactgagccattgcactccagcctgggcaacaatagcaaaactccatctcagaaaaaaaaaaaaaaaaaaaaaaaaaaagattaaagggcatcatgtatgtaaagagtacagaggagggcacatagcaagcactcagtaccttataacttttattattctttttcagcttaaaaaattatatgtctacattgaattcatatttattcatgaatgaatacatacgatgttttctgtgtgccaggtcctgttctaagcatgtttcaaatattgtctttatttgatctgtatggtatcctgtaaggtgaggacttaaaatattcccaatgtgaaattgtgaaattgaggcacagacaatctaaaaacttgcccaaggtcacattgctggtaagccactaagccagatactttgaaaatagtattagcatttatattatataaaatctcttttagtttccctttttttcctaatagtgcaagtttattcaccatgtttttagtttttctcaggaagatttaaagaagtgttaggtggtggccttggtgcttcagtggctatcaggtcagccagaggtgactcgtttttgtcaccagggtgtgctgtgattccaccagtctgaacttactgcagctgctgtgaagctggatgggaatctctttattgtctttgctgctgcttagcgaccacaggtttttcagcttggcgctttaccatcacctgggcaactgcctgagatcccaagttattttctttttgtgttgtaccatcctttcctgctcatttgtgtcctcgtgtaaatgaaggagctagcatgtctggcttgttagcagagtgcctagatgcccgagctgtatgttgtcaagcattatgaagctgccaccacacttattattttgctacataagaaattagtatgtcaccaaattgattgctttaaaaaatttggtatcaatagcattttgttaaacttgccactgcctttagtacttgcatctttggtgctaagttcctgatgaatttggaattaatcattaaaaatgcacataggcttgataaacttctataaaatattaatattttctatagaatataaatttttcctatagccaaatactccgtcattatgaataaatgttatctgagattctgtttataaaggatcactttctattcatttgtggcttaaaagagatacttatgtctatgtagtaagaattatgaaaagagcatagattgatttaaagtcttaagagtgtgggtgtacatgcatgcacacacacgaaatataatagggcagcatctctggcagactaatcttgctttgtataattaagaaaacttttcatgtctttcatcattctttttttctaaaattgaagtcatctcttgatggttatcatcctagaaaatttgattagtaggaagcttaaacaaataaccaaaatgaatttattagcatggccatgtgatgttggctttgtacattgttttcaatatatgtattaatctgtagttttccttgaaagggtacttgtttctacatttttatagagagtttctcagaagcctgggctgtttagtgagaaatcttgggaaatgccttaccttactttagaaaagagacttatttctccagataacactgtctttaagcaaacagtgtttgtgtaaccaccttgtagcaacattcagcttgaagataatagccttcacatgcttgataaaatgatgaaatcactgaccagcaggatccgtcagtggagtcagcattttatcacaatgtgataattctgtttaatgtggaaatggttacaaaatcttctgatatgtgtggaattcctgtttgatgaccacttgcttggaggaaaaaaaaaacctgtgcaagaaggtttagtgtgtttatttcattgtaaagacatttctgaccattttctttaattgaatagcagaagtgtatgttggttcatacactttgaaatgtaaagtttctgctcaggccattgtggaatgagcatcttccattaatctcgcttcacactaaaatgagtaagagacttatgattttttgaactgcatgtttaaattgtaattttgctggaaaagttaccaaatgaaacatttctgaagaaattaagataattagacaagacttatgaaccacacagtgtcattatttttttaaaaatatatagatgaaagactggacaaagttcaattctgcattaaggttcctttcaaagtcaaaataattaaggtaatcaagcctcacactgggcaaaggtttttttccctcttttaatctgattgacttttttttctatctttgttttttatgaactcatattttttaggagattttagggagaaaaacccagtgcctagatagatgtgaatgatcatataccaatgaatgccattagcctgttttttcatgttctttacttgtgctcttggaaatttgagtgtcttaaataattggaatgcatataaagacatatttttttctatgctaaagaaaagcaaaaactttgaaattttttgataagtggaaatatagatattacaaagaatatattacacacttctaaatctaaatttgtcaatcaccgctttttataacttaagtttttggtagaagtatgttagcctttagttttgtactggaatatttttagggctatctgaccttctaggttttcttatcccctcagtctgaccttccacataacctgtttctgttcatttattgatctcctaccttttacatatggattgattcacttttcattcattcaactaatatttattacctgcatgtatttgcctggtccagaactggggtgagatattggccataggaaggtatgatcctattgtctgttcttacagcacttatggtctaaccagggaaagaaaaaacaaataattgaatttacagttaattataattttaagttctatagtattcttaagcagtcatttttttacatctccacacaagaggaaattgtgtattccttcagcgacctttagaagcagcctgcatttttttgtttgtgaggatagttgagggtggggagagactacactggtatgttatttgtatataatgcacagctttagtggtccataattatgggggtgttgcccattgtactgtatgaagtttttcacctccagactatgccttgcttctgtagatttctctcagggctcatcatgttcgccactctctatctcagttcgcagctccatttccactgcttgccttttctttaaagataatcatggttttgtccagggctttgccttatcctttggttgagaagatatcctctggatttccccaattcctccaggttttcctaccacatcttccctgtaaccatgagtgccttctcccttgtatagatacattaattatgaattactatatacctctacaaaaaaagcactgtatgtgtccctctgcgctaggcttaaagggaatttaagacaaaggtgaatagatttgtttcaccacagtttttttgtattaactaattaactttattttatttttgcctttttctacatgttctaaaccgccccacctcttttctcaaagaatttataacctcgtctagtgtttgtggtaggtataaataaatgttagttaacatcatgattatattttgtgtatgccccagcccacagttggagttcagaaaacattgattccattaatttgtgtttatttttcatagatttctaaataaatacaaatcttttagaaaatattgactcttccatttgtgatcattatgcttgaaatcactaggtagaagatatgtcctggggaatatcagaaacactagttttctagtgttttcttactggtaaagccctaggtaatagagctttaatagcatgaatctccagaaatctaaagctaactttaattcttttcactttctcaaaactatttgcttcaatagttgaataatatttacaaaatagttaactaatttgaaaactacacacaatattgctattctacttgtttctcacaattaaattctctattagaaatcctcatggagagtttgagcttcctaaagatttattgtaaatgtacaaattttccaaaacaaaaaggcaattaaatcttctgaaatttgaacagttaattaaaatcaatattaacgtaatgttaacataattgttttgtgcatattagtttattggaagtctgtttaatcactgcctgggagactattgttttatgtaaaccagtattctattgaacggttcctttttttgtaagactggttacagttttatcccctttaaagatttctgtaagtggccaggcgcggtggctcacgcctgtaatcccagcactttgggaggctgaggcgggcggatcacgaggtcagaagatcgagaccatcctggctaacacggtgaaaccctgtctctactaaaaatacaaaaaattagccgggcgtggtggcgcctgtagtcccagctactcagagaggctgaggcaggagaatggcgtgaacctgggaggcggagcttgcagtgagccgaggtggcgccactgcactccagcctgggcgacagagcgagacctccgcctcaggaaaaaaaaaacaaaaaacaaagatttctgtcagtatcgggttgctctgcgatttagtggttggccttgataagctgagtgcaaactgtaaatttgttttctagttctgccccttctccactggttgctgcttgtgtggatcaggtttccttctgttctagttagctgtaggcttgggtagaattcagcagttaattggagggagggagagagggacaagaagagaggctccacaatccagttgctggtgtatgtcactgtagaatccactgactgatattttatcctctggaaattataaaatcctactttaacacctacttttctctttgctgatggagaaatcagggaaatcgtggagaagtcttttagattgatgctaaaagatggattgatacttctttcatcctatcagccttttagattgataggatgaaggaaggttcatcaagtttttccagacatcaagaggttaaagtcccttgctggacgggaggtagagggtcaagtggctaagtagagaatgcttatagagcagtgcttctcaaacattgccatctatcacagtcacttggagagctaatagagaatacagtggcccaggcttcttgacataggccagggcttttgtatgtatatagtaagttccctaggtgagtctaagcttgagaactcctgggggtgagagtatctccagtcagcttttcctgtagtatggtgagtggtaaaagggaagccagggacagtgggatggaagaaggactaacatctgagggcttcttatgtactgggtaatgaggtaggtgctttcaggtgttatcacattgaatcttcacagcaacacaatgctgtagatattgcttcttttttatagatgagcaaactgaagttcagaatagataaatacatttcccaaggtggcatagtgtgtaataatcaggatttaaactcctttgattctatttgaattcaaagaccatgttctttccttgccattcattccttcagcaatagaagttgagcctcagttttcttatctgtaaaatgagattaataatagtaactcattgagttatgaaaattaaataatatatgctaagcacataaagcagtgccaggtacttctgtagtaagctcctaatgttaactatcatcattatttaaattatactctagttcttgctatgggacagttatgatgttaggggatggggatacaaagatgataagatattacttgacctcaggtagtttaacaatagtgggaagacccgacagttgaaagtagtatgttatttctttttggcatccattataaaatatgtgagtaaatttagatagaaaagcaaggaatgctgaaattcagagatggagcctgtagtggcgtgcatggacagactttccatgctcgagacttccatttagtaaaaattcaggcctgttgtggatcttcagatcatttgaaaaacagtcactgagcacttggggtttgctgtatttctttttattaaacctatttttagaaccctcatgctgatctcactcttttttctttttaatggaaatattatatgcaagtacagtgtctgaaaaaaaaagtgactttatgtatagtgaaaagcttcccttcaagttattagaaattttagatcttttgagtcttaataagaatttgattttttacctttttatgactcataagcaaattcaccagataagaaaaattgaatctgaaattagttaaattttactactcttggatattagaattaaggtaatagtagaaggataattgaatttcttagctaaattgagggcttgaaaagtttctgaatttcagtactaccactgactcatgtttgagttattatggattatctaccctttgtttatatgtgtggtctgtagatagcagcagggcctggcttagtgcttggcatgagcagatattcaggacgtatgtttgggaagaatgtatgaatgagagtaggtaagtagcaaagctggtgaataagcagttgaagaagatttttgtgatatcttaccatatttaataaattactttggaagacatttgtgtactgggatctgaagaacatgactgcataatttaatgattttgtaggatttattttattaggtcttttttggtgtcactgcctcagaatgttattgtattattttgatcttcttcacttgtcaggctctcagatttacttttgtcagtcttttacagtttctatacagtcaaggaagctgcactgttacatattctttcaagattaatgttttgggaccacattcttcatagtttcttttctgtcaaaccagtcatctttggtgagaagggtgttcatgtaagcagagaagctggtgttgtattatgcagaatgtcatttcctctcacttattttattttttacccagagcctttatcctctctcagctcctgaactgtggatagagatgcccacaatccagcaaatactttttgccttctggattctttgttcagggtctttgtgctcagtgtagcttccttcctaagtagttaataggtccctcttctgctgatctcttctctccccttcccccaattgccagtggtaagaagtatgaggttccttaacatagcacacttttctgctgttccaggtgcttctcctgctgttcctactcttcttcccctacctctctctgtacctagctcctgtttcagtcaccaaggtttggggtgcaactgattctgtcaacaagtatggagcatagtacccccaaattagtttttcaaccttgtcccttcccaaccttcctcatctagtagtccccaatgtctattgctgccatctttatatctataagtacccaatgtttttttttttttgagtacccaatgtttagctcccacttacaagtgagaacatggagtatttggctttctgttcctatgttaattcgcttaggataatggtttctagctatatccatgttgcttcaaagaacgtgatttcattcttttttatggacacacagtattccatggtatatatgtaccacattttctttatttaattcaccattggtgggcagctaggttgatttgctattgtgaatagggctgcagtgaatctacatatgtacatacattcagtggaaccatttattttctcttggatatatacccagtaatgagattggtgggtcaagtggtagttttaagttctttgagaaatctccaaactgctttccccagtggctgaactaatttacattctcattaacagtgtataagtgttctattttctccatagccttatagccaatgtgtgttgtttttgtctttttaatagtagccattctgactggtgtgagatggtatctcattgtggttttgatgtgcatttctctgataattagtgatgttgagcatttttgcatatgtttgttggccacttgtatgaaagtgaccagttttaaatgaatgtgtcaatataaagttttcctcctggttcacagtgtttttcttaagagtattgcctttttttcttgaaaaagagaataaaacttggtattttttttcccagacaaatcctaaaccttaagtttgggaaagcactgtggtcttctccttacattgtatttctgtattaagacatgaatgtattttgtctataaactgatttatttctctcatctatcaatagctaaacataatttctcttcttttatgtctctctctccccacctttcccccatcatcccttcttctacctcttcccttttctccctacttttctgcttctctcttaccatttttcttctctctttctctctcctggaccctctgattttctcacttgcccttcactaactatgctcaaagaagttaaaaactgaggtcggagatggtttttgtaaagactaataattctgatgcaggactaaattaaaaatagggttcttacatgaggtttgaattagaaagttgtgtggatattgtcatgtaacttcttctagtaacctgttctattgcttacatttaataaataaaagccaagctatgacttaaaaatcttatcccgtaatcaaagtaaagtctgtgctattgttatagtgagtgttatacaaaagcaagtcagtgttagtcatttacttttggaattattatctttcttctaaatgcaagcagtactttttccctcagcagactttaagtgtaaataactagagataatataaaaatattaggaagaagggattgattatctctcatttttgattagtacagatacagaattttatttttcttttttctttctgaattttcttcctcccttctggatttttatcttctttcggctttcttttaaagagaatacttctttgctggaatcaattcagataaaaaggtagtagttttttattggttagggaaatttagtaataaaaaagaagaatgggaaagagagagataagaaaaatgatgaggaatctagtcaattatgaatttaccagtacaggaaaatataatggtaacatggatatcttctgtttcagaagagcaggcaaggattgggggttacatgcctaatagtgattcctgcaagtcaacttttcaaaatagcaacatagtggagaattctgctgaatgatattcttaaaagcataaggccagtatttatcattcagcaccaaataattacagatagctttcttcccagaggaacagaagaagtaatgtgctagtaaatgcactaattctgtatctggcctgctgtctgtcacttcatgatagtagaagagttgtggaggaaagacgttaaatcatttgagatgtttttggtgctatcttgtatctactagtcaaattttacattacacattatgcacttaaagggcataagttttaaagatatttcaatgatgttctgcctagtgtagattttttttctgtattgtgtaagttcctgacttgaggttgtgaaaccttagcttgagggtgacaatgaggtgaagaagagatgtctatgaacctgattttgtgtgtatagtattttgtgtgttctactacagaaggtccataggttttattccaaaacctaataaaaatagaaacctgtgctatgagacccaggtaagaatttggcatggaaatgttagccaggcaaatagagaaaagatacattgttttcatagactcagccacaaaactgtgccttccccctctgatctcagccgcttactgtaaagaatgttacctataagtattgtattttgatttagattcccatgtttttgagtataattgtaaccaattttatggtaattatttttgaaagaaaaacaaaaacatggtctagttatatggcagttatccaaaagtattgtctccaaagctgattccaggataaaaaaattaactattttgaataatagctttaggatcactttgataattagaggtggtaattggccttgttgtattgtatcttttttttttttttttttttttttttttgagacggagtcttgctctgtcgcccaggctggagtgcagtggcacaatctcggctcactgcaagctctgccccccgggttcatgccattctcctgcctcagcctcccgaggagctgggattacaggcgcctgccaccacgcccggctaatattttgtatttttagtagagacagggtttcactgtgttagccaggatggtctcgatctcctgacctcatgatctgcccgcgtcagcctcccaaagtgctgggattacaggcgtgagccaccacgcccagcctgttgtcttgtatcttaacactcatttttaagtcattaattaactaagctacatactttatgtgtatttctccatgtttcagagatactttggcttaataaaaaatatttttaaagagtcttgtggttttcttttttaaaaatcaactaaaatatctgatctattaagcagaatttatcattctgttaacacaatctagtctatcatatttgacagtagtatttctctagtgctttgaataaattaaatcagtcaacaataattgcatttttagtattttaaaattctgttcctttttctcctctacattttttttttttttttgagatggagtctcgctctgttgcccaggctggagtgcagtggcatgatctcagctcactgcaacctccacttaccaggttcaagcaattctcctgcctcatcctcttgagtagctggaattacagatgtgcaccaccatgcccggctaatttttgtatttttagtagagatggggttttgctacgttggccaggcgggtttcgaactcctgacatcaggtgatccacccacctcggcctcccaaagtgctgggattacaggcatgagccatcgtgcccggcctcctctacaattttattttagtattatttattctcaattagtccaggtactgatgcttgtattatgaccattaatatataatcttggcaactcttgtgtttctgttggtaaaacattttcatggattctatcataatgtgatcatttttacctatcgttaagcagtttttcatcattgtatgcttacattaactttccattctgtgttgacaaccttttaatgttaaccaaacaactaaatttactttgatcataaatttaaattgggatgaatgggtagttatagataaaaaataaattaaatgttattatagatagatgtcaataatcaactcttcattttctgattgaattgaaatgtactgctaaggttatagttacgaaaaccaaggaaagtacattggggttttcttggtgccagcatagtgtttgagaagaaagttctaagaatagcaagaggaggagtgatgaatttagcaaatctttcattagtagtaaggtgtgattgcttgaaaagaaaacaatcttttcgagtgagaaataaaaacagtggcaggagtatatatagagaaaaatccaatgcaaaaccgtcctagtgggtgtcaggtaaccctacatgctttagtacaattaaaataggaatgttcaaagtgtaaagaaacagtggaaagagaagtccatctgggaacactgagagggaaagatgcccaaagtttcagctgttttgtggtccttggggccttctggggctactggttttacagttccaagagcatattaagatttttttcagatacaaccaatgttgcagctattaatgagaacaaaccatattaacattattattttgatcctcaaaggaaacaatacaaatgcctcagcaagtgctttctgattgtgtaaaactgaaaataattaactggaaaatgatcaaggagtgattttcaaaaaagatgtgatatatatgttctgtaattggcaaaagcgaaaataatcatattaagttgagaaaaaaagtccttgattaaaagacattcaccacgccatttaaaacattttgcaaaattttagttttatgtatgttatttttaaatcaggttcatataacaaaaagaagcaaatgttttaataatatatttatgtagtatcagaaaggaagaagactcctctcccatttatttttcctgctgactcttgttttaaattctaatttcaacaccctttgccagtttggagaaatgatttgtcagctgctctgtgaagaacactaaaatgcgataggaatattttaaatgcacaagtactgaaaggaaagtgcaggcgtttcccaagactttgaactgatgctatgttgtttcttaacagtgttagatctactaaatatttaaaaggcttttaaaagataaatggctttttttcattcctcatggtgctgatgacttggttgtgtctgatttttaactgatgtcatcagtattgacttgaaacatttcatgggtccttttctcattattcctgacgagtgtactgggcagcttttgttgctgaatgataattttttatctaaggagaataccagcaacaaagggaaattccatgggcgctgaaaatggaacctgctggagtaggttcagtatgtaatttagtaataccttttcttttctttttttttttttttgagacggagtcttgctctgtcacccaggctggagtccagtggcgcaatctcggatcattgcaagctccgcctcccggttcatgccattctcctgcctcagcctcccaagtagctgggacgacaggctcccgccactacgcccggctaatttttttttttttttttttttttttttttttttggatttttagtaaagacggggtttcaccatgttagccaggatggtctcgacctcttgacctcgtgatccgcccgcctcggcctcccaaagtgctgggattataggcgtgagccaccgcgcccagcctagtaatacctttttaaattttatcagtgagctctgctgtagttcctggaaattctggtgtcatattcctttgtgcctgtagctgttcatcttcccttgggccacaagcctgtataataactcatttcactctgatctttggaaacactgtgtgaatctctattttagcatttataatgcatgtcataattatttgtttacatgaaactctcccttgccagaatgtgagctccttaaggatgagaactaagtgcttttttctttgcatctcaccagcactcaacactgggtagaaagaagggagccttggggaggcctcttggatgtgtgtttcgtagttgaaatctctgttaatttgagttagagtaagagtactttgttttgacttgaaagtcctagtgagagtcattccttaatcaaaataactgatacatgtatatatacacacatatatataactcatatatacatgcatttatgtagacctttatttgaaatatatatgaaacataacataagtgaaatatataaatgtatatttgaaattgtaatcataaatatatctgtaataacattcaaattgaagaaagataattggctcaaaaatcagttaaaaatttcttccgagatttctacttttataagtcgtatcttttcatgtatattttactttttctgtacaattaaatgttgttataaataccttcccatcggtatgctatttcacgtatagattgattatctgtggtataaggaatgtcacaaatttcaaaacttacttttttgcctttttgaagtatttgactagggaatccacagacatgactgattaaaagggattatcagctttcacctaattcaactttaagcctttagtctggctttatttaaacaagtcaagataaatgtgttcctggcttttttaatcttaaaataggaaattcatttcctctttagtaatgcattttactatgttttattagttttttttctgttgtggttaaactcattttagaaaacttttaaaattcaggatacccttttctatgaaaacaagcagaattaatttctattattaataatcagcctataaaagttatctatcattttgttatcttaatatttaattataaatatcagtttttaatttacaatggctacattaattagctgggtgcagtggctcatgcctgtaatcccagcactttgggtggccaagccaggaggatagcttgagcctgggaatttgagaccagtctgggcagcatggcaaaatcctgtgtctacataaactacaaaaattagccaggcatggtggtacatgctcgtagtcccaattacttgggaggctgaggcaggaggattgcttcagcctggaaagctgaggctgcagtgatctgtgttcatgccactgcactccagcctgggcgacaaagtctcaaaaaaaataaaaaataaaaataaatcactatgccaatgtgggagttatgatcatctctgtttttaaaaattatctatgcaagcatggggcataacctttgttatagctctttcactgcattttttggctctatttcccaaataaaatagagaaacaatattttaaggaatgtattgtccccttagctttcttattttgccttttcaggaactatttgcgtttgcggtattgcttaactatgaaatgctagaattcataacccactatcttcatttcctccaggctagtagcttaataacatgaagaaaaattgattcttgtagtacctaaaatgacattttctgcctacataacctgttaatccagttttgagttcccattacattttcatcgtcagtggcaagccagattaatttatagtataatcattcaaaaagtttagtttacagattttaaagttgcttttcatatcaattttatttatgctgtttttatatttaaattgctttctatgtgagtcatccatgtaattttcatccaaactgaaattaacctttgcgtaatttctgctttcttgaaactactttttcttttgatgattaaatattgtatgattactggagttggtgattgctaactactgagagtcagtgtctaaagcacagtttctgactggcataaatgaaactactttgcaatagtcaatgtaatttcactgtaagggtcattgtgagcagatggttttccatcctgcaggattttaaatcttgaattctacagagtttgatattttgcacattaccaggagtttaccattaaagtcatggatttcaagtgatccaactcttctagctttaagagaatattaatttatgctgctttatgttccaattcttgaaagaaactggtatttagatgaaattaggtgattgacttttagactgggcaaaattaaactacaaaggatggcttaaaaaactgagaatggagcaagtgaggctccctattcatgctatgagagtctgtttttggactccttagagcaaggtatagtagcgctgaattctttcatgaatgccacctcctttttttctctttcatcctctttttcaaaattgatacataaaattatacatatttatggggcacatgcaaaatttcattacatgcatgaatgtgtaatgatcaagtcagggtgtttggggtatccatcatcttgagtatttatcatttgtatatgttgggaacctttcaagtcctctcttctagttacattgaaatatataacagattgttgctaactatagtcaccctactctacttttgaaaattagaacttgtaccctctaactaactgtatatttgtacccattaaccaacctctcttcatcccccctcccacccacacatccttctcatcctctggtatcttatcactttactctctaccttcatgagataaacttcatgagtaaagttcatgagataaattttttagctcccacatatgattgagaatatgtgatactagtttatctgtgcctggcttatttcacttaacataatgacctcctcttcaatccatgttgctgcaaaagacataatttcattctttgttatagccaaatactattccattgtgtatagccacattttctttatccattcatccattgatggacacttaggttgactccatatctttactcttgtgaatagtgctggaataaacatgagtgcaggtatgtcttcaacatatggatttattttcctttggataaatacccaatagtgggattgctggatcatatgatggttctattttttagatttttaacaaaaatctactattttccatagtggctagaccaatttaccttccatcaacagtgtataagagttcctttttctgtgtatccttgctagcatctgttctttctttgtctttttagtaatagccattctaattggggtaagatgataggtatctcattgtggttttgatttacatttccctgatgattagtgatgttgagcattttttcatatacttgttggtcatttgtatgtcttcttttgagaaatgcctattcagatcctttatccactttttaatgggattatttgtgtttctcaaactattgagttgtttgagttccttgtgtattatcttgcatattagttccttgttgaacgagtggtttgcaaatattttctcccattcatctgctgtctttttactcttgtttttcttgctgggtagaagctttttagtttcatgtagcttaatgtctctattttttgttgttgttatctgtgcttttgaggtcttaggcataaaatccttgcctagactaatgtcctgaagtattttccttatgttttcttctagtaattttatagttttgggtcttgagttgatttttgtatatgtatggtaagagataggggtccagtttcattgttttgtgtatggatatccagttttcccagcaccatttattgaagagggtgtcctttcccaaaagtatgttcttggtgcctttgtcaaaaatcagttggctgtaaatatgtggatttatttttggattatctattttgttccattgatcaatgtgttagtttttataccaataccatgctgttttggtttctatagccttttaatatatttctaagtcaggtagtgtgatacctccagctttgtcgtttttgctcaggattgctttggctacttgggctcttttttggttctatacaaattttaggattgctttttctatttctatgaaaaataacattggccaggcatggtggctcacgcctgtaatcccagcactttgggaagctgaggcaggtggattgcctgaggtcaggagtttgagaccagcctgaccaacatagtgaaactccatctctactaaaaatacaaaaaactagctgggtgtggtgatgggtgcctgtaatcccagctacttgggaggttgaggcaggagaatcacttgaactcaggagatggaggttgcaatgagcctagattgcaccattgcactccagcctgggcaacaagagtgaaactctgtctcaataaaaaagaaaaagaaaaaaacagaaaaataacattagtatttttgtaggcattgcattgaatttatagattgttttgggcattatggtcattttaacaatattaattcttcccatccaagagcataggatatctttccatttgtttatgttctcttgaatttctttcatagttttatagtttttcttacagagatctttcactttcttggttaaatttattcttaggtatttttttgtggctattgtaaatgagattgtcttcttgatttctttttcagctagtttgatatttatgtataaaaatgctactgatttttgcatgttgattttgtatcctgtaactttactgaaattatttatcaggtctaagagtttttttggtggagtctttaagtttttctagatataagattatatcataggcagagaggggcagtttgacttccttttttccaatttggatgtcttttctttgtttctcttgcctgattgctctggctaggatttccagtattgtgttaaatgggagtggtgaagtggacatccttgtcttgttctagttcttagagaaaaggctttctggttttcctcattgagtataatgttagctgtgtgtttgtcatatatgggctttatcatattgagttgtgttcttctatgcctagtttgctgagaatttttgtgatgaagtggtgctgatttttatcagatgcgttttctgcatgtgttgagattatcatgtggtttttgtcctttattctgttgatgtgatgtgtcatgtttattgatttgtatatgttgaactattcttgcatccctgggataaagcccacttgaacatgtatattgtttttttgatgtgctattggatgtgatttgctagtattaagatgaggacttttacctctatgttcattaaagatactgcctgtggttttctttttttgttgagtctttctccggttttggaatcaggataatgctgatcttatggaatgaattagagataattccctctgcttcagttatttggggtagtttgggggaaaattggtgttagttcttctttggaagtttggtagaattcggcattgaagccatttggtcccggacttttctttgttggaaaacttgttactactgactcaatctcattatctgtttttgtctgttcacattttctgtttcttcctcattcaatccaggtaggttgtatgtaccagaaatttattaatttatctcctctaggttttctggtttgttattatatagctgtttatagtagtctctgatgatcttttatatttctgtggtatcagttgtaatgtctcctttttcatttctgattttatttgggtctttgctcttcttttctgtgttagtatagcaagtagcttatcaattttgtttatctttccaaaaacaactaaatttccattttgttgatcttttatatgttttttagtttctgtttaagttctgctctgatttttattattttttcttctcctaattttgcgtttgttttttcctgcttttttagttccttcaggtgtattttcagattatgtatttgaaatctttatactttttaaaaatttttattttattttaaattcagagggtatgtgtgcaggtttcttatgtggatatattgcataacgtttgggtttgggcttctggtatttccatcacccacatagtgaacattgtacccaataggtaatttttaaaccttcacccccttacaccctctctccttttggagtccccactgtctattatttccatctttatgttcgtgcatacccattgtttagctcccacttataagtgaggacatgcaatatttgattttctgttcctgagttattttacttgggataatggccttaagttccattcatattactgcaaaggacatgatttcattcttttttttctttttctttttttttttttttgagatagagtcttgctctgtcaccagactggagtgcagtggcatgatctcggctcactgcaatctccgcctcttgggttcaagtgattcgcctgcctcagcctcctaagtagctgggattataggtgcacgccaccacacccagctaattttttgtatttttagtacagatggggtttcaccatgttggctaggatggtctcgatctcctgacctcatgatccgcccaccccgtgtcccaaagtgctgggattacaggcatgagccactgcgcccggccaatttcattctttttaatggatgcacagtattacatgatgtgtaggtaccacattttctttttccaatcagttgttgatagaccctttggttttttttttttttttcttgagacgatgtctcactctgtcgcccaggctgaagtgcagtggcgcgatcgcagctcactgcaacttccgcctcccaggttcaagcgattctcctgcctcagccttccatgtagctgggactacaggtacgcgccaccacaccaccacacccgttatttatagtctttgtttctttctttttagtagagacaaggtttaaccgtgttagccaggatagtctcgatctcctgacctcgtgatccacccacctcagctcccaaagtgctgggattacaggagtgagccactgtgcccagcctgatagacacttaagttgattcaatcactttgctattgtggatactgctgcaataaacatgagtgcaggtgtcttttttatatgatgataaactctttctacctttttgatgtaggtgtttattgctataatgaacttccctcttagcactgcttttgctgcatcccataggtttgatttgttgtgttttgatttttaattgttttaagaattttttttatttcatccttgaccgagtggtcattcagtagcacgttgtttaatttctatgtgtttgtatggtttcaaaagttcctcttgttattgatttatggttttattttgatgtggtctgagaaaatacttgatatgatttcatttttaaataattagttgagacttgttttgtgtcctaatgtatagtgtattctgctgagtgttccatgtgcttatgagaagaacatttattctgtaactgttggatgaaatgttttgaaatatctgttaggtccatgtggtctaatatgcactttaaatccaatgtttctttgcaaattttctatctagaggctaattctgagagtgggatgttgaagttcctaattattattatactgaagtctttctcactatttaggtctaatagtattttctttatatacctgggtgctccagtgttgggtggaaatatatttagaattgttatattctcttgtggaattgatctctttatcattttataatgatgacctttttttttctttttactgttttgacttaaaatctgttttatctaagtatagctactcctgcttttgcttcttattggcatggaatatattttttccattcctttcctttcagcctgtatgtgtctttacaggaaagatgagttacttataggcagcatatagttgggtcatgttttatttatttatttatttttaattctttgaacctgtctatattttttaagtggaatatttaatccatttacattcaaggttgctattgatatatgaggccttattcctgtcattttattaattgaagtcattgttatttatattctttgtttctttcattctctcttattgtttatctttgtggtttggtggttttctgtagaggtaatatttgagtctttttatttgtgtttgcttcaccagtggtttttatattttcatatgttttcatgagggtagatttcattcttttgcttctagatgtaggactcccttaagcctttattggaggatgggtctagtgatgatgaattttctcagcatttacttatctgggaaatactttagttctctttcatttatgaaggataaattttctgggtatagtatacatggctgtcagttttttttctttcagctcttgtgaatatatcatcctaaactcttttgacctgtaagctttctgtggagaaatctgctgttagtctgatggggattcctttataaatgattagatacttttttcttgctgtttttggaattttctctttgtctttgacttttgacagtttgactataatgtgctgtggagaagtcccttttgagttgtatctgtttggggatctgtgcacctcctgaatctggatgtctaaatctcttgctagggtagagaactttttatctattatttcactaaataggttttctgactctctcattttctcttcatcttctggaacaccaaaaatgcaaatatttggtcactttatggtatcctatgtcatctaggctttgctcattctttgtttttcttttttctttatttttgtctgactaggttatttcattagacctgtcttcaagttctgagattccgtcttctgcttgatttagtttactattgaagcttttgaatatattttgtatttcactggttgaattcttcagctccagaatttctgttttattcttttttatgatatgtttttggtaaatttctcatttatatcccaaatatctggcttatttgtattgtttttcagagttcttctgtatctcactgagtttctttagtatacatattttgaattatttttctgggattttgtaaatttctctttggggttgattgctagagaattactacattcttttggaggtggcatatttccttctttttcatgtttcatgtgtccttatgttgctctctgcacatcttgtgtaacagttgcttctttcaacttttttgagtttgctttataggggagaactttttttttttgaagatgtatcatggtattggttggatagggcacttggctttgattctgggtgtgtgcagtagtacagcttctatgtaatttctttggcgctaaacagcatcagtggtgtctgtgatttctttggtggcttagggtgtgattgttaatggaagctgtggtgaaattttgctggggactgggatgccaggtgggccagttttggggccccagtggtggcagcagtgagctgagtgtgcctgtccttgggccttagggtggtgtatgctggcactggcagtgggtccagaaaggcctattcttgagcctccaggtgacttgcttaggtgccaggaatggcagtgtgggtcaggcaggtaggcaggttctcggtcccctgggcggctggcatggagtgagtgatggcagtatcaatggtgggacaattgtctgggacaaaagtagtctgtgctggtgttggcagtggctgtgacaggctgggtgggcctgtctccagggccttaggagagtgtgtgggtgggtgccagctgtggtggtagcagcaggttgggtgggcctgaccgcaggctctgggaggagtacccgggtgccagtgatggtggacttaactgtttgatcaccaggtccttagatggcacgcttacttactggaggatgaatcttcaggtggggtttgacgcatctgtactacagccctgctactgaggagggcaagatgcctttcagtgggagcaactgtaagcaggcggctgggacgcatgcactttgctcatgctttggccttgcagtagcccatagtggcagtggctgtgggcatttgaatttgtccttggggtgtgtgaaaatgcatgacccttctgctgctggggtgaggttgctgccagtggctcctgcattggccctggcagaggctgctgcaggcagcgaatgtaaatggcactccagggatgtggggatgcaggggctgttgggacccagggaatgatgcagtctgatgggggctgagttctcaaaatggtgctgtgccatgcctgtttaggactcagggtttgtaggactcagtatgagctctctctggagcaatactattgcacagtctccaggcagctctctatgttggtctcagggcctgcaggggtcaagtcttttcctgtgtttctcctatgactaggattgcaggagttcacagtgggaacgtggactgctgggggatctcttacttatcatttccccacattagggagcctctccaggctcccagctgatctcagtcaagcaggctgacttgcttccctttcctttcttgctttaggtgtttctgtcacttccctgttgaatgccagtgttctttcttagaggatctattttaagtgtgattaactacttgctatttgggttcttctttgtggaagagaagagtaccagatgcatctagtcagccatcttgaacttgctaccttctactttcactgacattcaaattataaatctttagagaaataatggagatacttatactttttctttcctaacattgaaatgtgttttgattaaagacaacaatgccttgtatagcagggatatagcttatttatgtttgtcttcttagtgcctgccacagaatggctactcagtaatttagtgaataaaagagtaaatgcattgatggatgaatgaaaatccctcggttatcagtgtggaaatttttaatcattagctatgttatcctgcctgtttggccttttcaggaacctatctctactaggtaagtcctcactagggcattaggctctaaattctaatctctagtgttactgttaccatgattttcagaaaggaattaacttcctcccattttaatgaaacataaaatgctcttgcatatgttttaatagaattaacacagtatgatttctggttgaaataatcttttttcatttttgcttattaataaataatgtatcaatagtgaatgatttatcataagtaaatggtaaaatacaattcacacagattgtcccttgaggtctaatatcttttgtataaaaaaagtttttaaaaataaatattttgtgatggtcataggcttctgaagttattagaaagggatatatggattataggaaatattttcctgataatatggtagaataaaatttttctagtttttatggtgattctttactttccttttagacaattccgtgtgtgtatgtgtgtgtgtgtgttgtgtgtgtgtgttatacttgcatctgtttcttcatctgtgcccaaaaagtgggttctcaaattttcagttagctttctattcttatctctctgtagacagcttctcctttggaaaatagcatctattttcagggattcaaatattacttctttcaagttaattcaataatatttctctttagttttaatccacaactgagctccaattctaatatcatcaaattatgtaatgtacatttccacctggaggtctcccagacagtccaggttcagcatgtctgaaatcaatttttttcacttttatcattctccctagcttcagagacttgggctcaccttccatcccactctctgtatctccctccctgcagttttttcttttcttttcctgggaggtagcttttgtatcatttcccttctcattgttcctctcccaattcagccatttatcctattgtcccataatagatttccttatagctacttaacttttcttctagtctactcccacctccctgaacaaatataaactggatacaactgtttacttcagcatattgctttcctctaaataacttcccatgccttatatactctgtagttaatatctaaactcattagcctggaattcaaaatctgaattttgccccactctgcatttctggttttggttccagtccttcagcttctgaaatctacctcagcaggtcagcacatgtactctttaacatgtcttgattttctgttttttttctcatgtcccttttttatctcagttttcttttcatgaatctatcccatttcaggaagctaggtttttgttgttttggactcttctcagaattcctgtagcacttatataagccatttatttaatagttaattgttgacagtgtgacattttctatatttttgtcctatgttatttatttcaagttttctcatttttttcacatgattatatgcttcttcacaaactaactgtgaagtcctaaaatagtctttaagatcagagactatatataatatctttaaatattttttttgttttttttgagacggagttttgcttttgttgctcaggctggagtgcaatggcagggtcttggctcactgcaacctctgcctcctgggttcaaatgattctcctgcctcagctttccaagtagctggaattacaggcgcccaccaccatgcccagctaatttttgtgcttttttttttagtagagacagggtttcactatgttggccagcctggttgcgaactcctgacctcaggtgatccacccacctcggcctccaaagtgctgggattacaggcgtgagccaccgcacacggcctaaaatgtttttataatactgaagtaaaacctcaaaagacccataatttcttaattataattaagcttttattgagttatatcttttgtaatactttctatgtataaaatattatttcaaaaaacattgaaaactttacgaagactctcctgtgtgccaagaacaagtcttaggagctgctaactctgttcatctcaccccagtatagtactgtataaagcgtaataattggtaacattagttgataaagcaaaaaaattaactcatcagtcaaaagaaatatccaattaaagttgagtgggccctatttgtacatgttttagtgactgtactcatagtaatctataaaaataattccaggagtctccttcagagaggacattaatctattaagatattaagcttatacaatagatgattcataatctctaaatatgaaaataatgtaaacattttcaaaaaggagtaaaatgacatagaggaagttatacttgtaaaattatgagtgagtaagtgacctacaaacacataaatattttagcattaaatgactgaattaatgaatgaattagagaataaatgaaccaccatagagatattattgtcaattcaaagataccttctaagttgttgcagcattggaaggagaaatctagaaagagaaaataatggatgtcttttaaaaaatcaagacttttttttagagcagttttaagtttgcttaaacacttctgcttaatttttaaagaaaaatggagcagaaaacccagttttcatatttccccttacatacccctacacagaggtttccatgttattagcaccttgcattattgtagtacatttgttacaatattgaaccaatattgatgcattattattattaactaaagtccacagtttacattagggctccttccttgtgttgtacagttctatgggctttgccaaatacataatgttatgtatccactacagtattatacaggatagtttcactgccctaaaaaactcctttgcttcacctacttatctttcccccttgccttttaccaggtggattcacagctgaattctatcaaacattcaaagaagaattgataccaatcctattgacactattccacaagatagagaaagagggaatcctccctaaatcattctgtaaagccagtgtctccctaatacaaaaccaggaaaggacataacaaaaaaaggaaaactatggcccaatgtccctgatgaacatagatggaaaaatcctcaatgaaatactagctaaccaacttcaacagcatatcagaaagataatccaccatgattaagtgggtttcataccagggatgcagggatggtttaacatacacaagtcaataaatgtgatacaccgcataaacaggattaagaacaaaaatcccttgatcatctcaatagaagcagaaaaagcacttgacaaaatccagtatccctttatgacaaaaacctcagcaaaattggcatagaagagacatacataccttaactggaacatgacaggggaaacaaaagctctggttttcattgagtatttaaataattaaactttttctccaataaaaacttatcaattatacttttttttgggggggggcggtggacagagtttcactcttgttgcccagggtggagtgcaatggtgcgatcttggctcactgcaacctccgcctactgtgttcaagcgattcttctgcctcagcctcctgagtagctgggattacaggcatgtgccaccacgccaagctaattttgtatttttagtagagatggggtttctccatgttggtcaggctggtcttgaactcccaacctcaggtgatccgcctgcctcagcctcccaaagtgctgggattacaggtgtgagccactgcacctggccaattatacttcttttaaaaaattttctgatgcccagcgttggccatatacataaataacactatattgctttataagtagtgcaggtattcccaattcctgcctcccatcctttataatatttttgttattcattttacttatccataagctatagtcattgaatacattgttcctattattattttgaatacattgttgtctgtaacattcatcttttctttatataatccaagtttctaacctaagccattatcctctcttcttaagaggttcttaagaacctctgttaactttttttatccccccaagacagagtctcgctctgtcgcccaggctggagtgctgtggtgcaatcacggctcactgcaatctccacttcccaagttcaagcaattctcctgcctcagcctcctgaatagctgggattacaggcgcatgccaccatgcccagctaatttttgtatttttagtagagatggggtttcaccattttggccagactggtctcgaactcctgatctcatgatccacctaccttggcctcccaaagtgccgggattgcaggtgtgagccaccacacccggccaacacttctttcaagataaatttcctcatttatcagttctaggagctttttggaggagtctttagggttttcttggtatacaatcatatcatcagcaaacagcgacagtttgactaactctttaatgatttagatcccctttatttctttctgttgtctgatagctctggctaggacttccagtactatgttgaatataggtgatgagagtgggcatccttgtcttgttccagttctcaggggaaatgctttcaagttttccccattcagtataatgttggctgtgggtttgtcataggtagcttttattatgttaaggtatgtttcttctatgtcgattttgttgagggttttcatcataaagggatgctggattttgtcaggtgctttttctgcttctattgagatgatcatgggatttttgtttttaattctttttacatggtgtatcacatttattgagttgcatatgttaaaccatccctgcatccctggtatgaaacccacttaatcatggtggattatctttctgatatgctgttgaagttggttagctagtatttcgttgaggatttttgcatctatgttcattagggatattgggccttagttttcctttttttattatgtgcttttctggttttggtattagggagatactggcttcatagaatgatttagggaggattccctctttatcttgtgaagtagtgtcaataggattggtatcaattcttctttgaatgtttgatagaattcagctgtgaatccatcttgtcttgggctttttttgttggcaattttttaaaattaccatttcagtctcgctgcttattattggtctgttcagagtttctatttcttcctggtttaatccaggagtgttgtatatggccaggaatttgtccatcttttctaggttttctagtttatgcacataaaggtgttcatagtagccttgaatgactttttttgtatttctgtggtatcagttgtaatatctcccatttcatctctaattgagcttatttggatcttctctcttcttggttagtctcactaacgttattaagtttgttaattaattttcgaataaccagctttttgttttatttatcttttgtattactatttttgtttcaatttcatttacttctgctctgatatttgttatttcttttcttcttctggatttggatttggtttgttcttgtttctctagttccttgaggtatgaccttagattgactatttgtgctttctcagacttttagatgtgggctttagatggactttcctcctagtgccatttttgctgtatcccagaatgtgataggctgtgtcactattgttgttcagttcaaagaattttaaaagtttcatctgaattttattgattgttgactcaacaatcattcaggagcaggttatttaacttccatgcatttacatggttttgagtgttctttttggagttgatttccaactttattccactgtggtctgagagagttcttgatataatttcaattttctttattgagactcgttttgtgggctatcatgttgtctatcttggagaatgttccatgtgctgatgaatagaatgtatattctgcagttgttgggtagaatgttcagtaaatatctgttaagtccatttgttctaaggtatagattaaatccattgtttctttgttgactttctgtcttgatgacctgtctagtgctgtcagtagagtattaaagtcccacagtattattgtgttgctgtctatctcatttcttaggtctaatagtaattgttttataaattcgggagctgccgtgttaggtgtatatatatttaggattgtgatattttcctattggacaagttcttttatcattatataattttcctctttgtctttttaaactgctgttgctttgaagtatgctttgcctgatataggaataggtactcctgcttgcttttggtgtccatttgcatggaatatctttttccacccttttaccttaagtttatgtgagtcctttttgttaggtgagcctctgaaagacagcagatagttagttggtgagttcttatccattctgccattccgtacctttttttttttttttttttgagatggagtcttgctctgttgcccaggctggaatgcagtggcatgatctcggctcactgcaacttccacctcctgggtttaagcaattctcctgcctcagcctcctgagtaggttggataacaggtgcctgccaccacaccctgctaatttttgtatttttagtagagacggggttttgccatgttggccaggcaggtcttaaactcctgacctcaagtgatccacctgcctcggcctcccaaaatgctgggattataggcatgagccactgcacccagccagcattctgtatcttttatgtggattattttaggacattttcattcaacattagtattgagatgtgaggtactattctatatattatgcgattttttgcctgaataccttggtttttttcattgtgttttcgtcttataggtcctttgagatttatgctttaaggaggttctattttggtgtattttgaggatttgtttcaagatttggagctccttttagcagtgctggtttggtagtggtgaattctttcagcatttgtttgtgtgaaaaagactatctttccttcatttatgaagcttagtttcactggatagaaaattctttgctgatactgatttagtttaaggagactaaagataggaccccaatcacttctagcttgtagggtttctggtgggaaatctgctgttaatctggtaggttttcttttatagttacctgatgcttttgccttacagctcttaagattctttccttcatctttagataacctgatgactgtgtttctaggtgatgatctttttgcgataaattttccagattttctttgagcttcttgtatttggatgtccagatctctagcaaggccagggaaattttcctcgattatcccctcaaatatgttttccaaacttttagatttcttttcttccttgggaccaccaattattcttaggtttggtcattcaacttcttaaagtctttgttcatttttcttttcgtctttgttagattgaattaattcgaaagccctctctttgatctctgaagttctttcttctacttttttgatgttattgatgagactttctggtgtgttttgcatttctctaagtgtgtccttcatttcgagaagttgtgattattttttatttatgctatctattgcagtgaagatttttcacttcagatcttgtattatttttaaaattaaatttatttggacttcacctttctctggtttccctgattcacttagtataatcgaccttctgaattctttttctggcaattcagagatttttatcttggtttggatctattgctggtgagctagtgtggtcttttgggagtgttaaagaaccttgttttgtcatattaccagaattgtttttctagttccttctcatttgggtagactatgctagagggaagatctagggctcaagggctgctgttcagattctgctgtcccacagggtgctcccttgatgtggtgctttccctcttcccctaaggatgtggcttcctgagagccaaactgcagtgattgttatttctcttctggatctagccacccaagagagctacgaggctctgggctggtactggggagtgtctgcacagtgtcctgtgatatgtgaaccattttcaggtttctcaaccatggataccagcacctgctatgattgaggttccaagggattgaagtggactctgtgagggtccttggttgtgtttttgtgaagtgtactggttttgtgttggtttgcctccagtcaggaggtggtgctctcaagagtgtatcagctagggttgtatagggaggatacaagcttgccctagggttgccgttggataagtattcaggtttctcaggtggtgggcagagccctagagttcccaagggattatgtcctttgtctttggctaccagggctggtagacaaagatcatcaggttgggggaggattagacatgtctgatctcagactcttcttgggcgggtcttgctgtggctgctgtgggggatgaggatttggttctcaggctaatggagttatgttcctagggggattatggcttcctctgctgtaacatgcatgtttccagggaagtcagggaaagctagcagttataggcctcacccagctcccatacagcccaaaaggctggtctcactcccaccatgcccctccaacagcactgagtttatttccaggtagcaggtgaacagggctaagaacttgccccaggcctcccggctgagaaagcaagtggggctttcaagtttcatgcctccccacctgccatggcttctgtgctgtgtctatacacgtgatttgcccccttcccaaggttttgtccaggaagctttgtgtgcagttgaaattgttacaaagtttagctggaagtttccttcttcctatggtcttttcccagttcctttggcagcccttcccatggacccctgtgagacaaagtcagaaatggcttccctggggaccaagagtgcccacaggactctttctgctgcttcttctaccgttgtatttcactcagttctctaaatttgtctcagctccaggtaaggtcaaatccttttcctgtgatctggaacttcaagttcctcagtgagagtgtgtgttccagggcagatgattcccctttcacactttcacactctgggcactagcagtttttcagctgtctcttggggcctgcaacagcaatcttccttcttcaaagggtctctggattctcttggttttcctggtatgttcctgccatagttcttggaggaaaagttcataatgtgaatctccacatgctgctctgtccatctgagtgggagctgcaaggtagtcctgcctcctatctgtcattttttcccacatcttagcctacattttcttctactgctcttgtttatgtttcccctcttgtctttgggtttccctaaagactccttcttaaataggacctatgacttgcagttctttcagctgtaatccactgttattattcaggaacctaattgctgtgctaatgaagtgtggagggagggaaagtgttctgtgttcctatgattaggttttattttgtgctaatgaagtgtggagggagggaaagtgttctgtgatcctatgattaggttttattttgtatatgagtcggtttccccagtctgtaaccttcacaagtgcttctactccattgcccctcatgtgagacaggaagtctagaggtgtttgaagttaggcattcctcttcaccagtgtcaaagacacagggtgctagagttggatattttcctgcccccaagtgagttaggctctcataaatcacagatgagataatctctggcaaagtagtttctttttaatttgatttttattattaatatctgctgggaaaccgatcacaacttgttcaaattgttcctaaaatcagagcaagcagatattgggtgacagcttcaaaaactgtcttctgaattatgaatgtaaacttaataacataaactttgagacatttattaattatctttcagggttttggcatttggtggatgagattgccaacctaatgtcttataggcaaatgaggtttaatcttgttgtcctaatttttcatgcattacttattaaaattaagctccaaacaaatataaatatagttcagcattagtagggaatccagcgatatgtctcctgtaaatgttactaacggttgttagctgtatttgtaagtttacattgatcttggacttcccaatgccattacctaaaatgtagaatccagaatgaatctaacttgaacctatttttcttcctggtttattagagatgtttatctgagagattactatgaatcataggattgtgagattgcctgtggtgacagaaggcatttttccaaatgtagagcttctgcaagtcttcaaaataattaaaattcataaaacacatgtaacagatggcataagtgtttgaactaaatgtgtgtgactttttactacttagttttacataataatgtgtttgtgcagttaaggtggtgacctctcatgataacttctacagatacataaagtgaaatgtgctctctggagttgctaaaatgtgacaattttagaatagatatgaaagtacttttctaatgatttttctataagttcaccattgtaatatcaaattacaaactcctgtcatttggagtttcttttctttgatatttagtcctttccttcaccaaaatggcttgagagaattaactggcagttagtgctgtgttctatagcattcagtttttcctgttaaaccttaaaagccatgtgtatttgaaacttttaattatgttttaaatatctctttgaatataagaagaaatgttatgctcttcatttttatcttggttttgaggagctaaaatcagttcttatccatcaactatcccctttacctcaaaataatacaaccataattctgacttgattatctgtgggtaatggtagatttgtgttaactcatctgtttcgattatatattgctgtgtgagaaaccattcccaaatttaggagcttaaatcaataaccattcctgttgaaacaaagatcaaatccttaagaattagtttagtgagaaatatgcaaaacctgtactaggaaaaagtttaaatactccagaaacacataagtagagttgaaaaatagagacttcccctctttgtatacaaacactcaacattattaagatgttagttctccttactacattagtgtacaaacttaatgcaataccaacaaatgtcccaagaaactattttatggaattagatcctatatttgttgatcatgtatttgtattgttacaaacatgtaacaaaagttaggaaaaggccaaaaaagagaaaactacaagtgatggctagccctatcagacattaaaacctagtaaaataggagatatcttctttttttttttttttttgagaaggagttttgcttttgttgcccaggcttttgttgcccaggctggagtgcaatggcactatctcggctcactgctacctccacctcctgggttcaagcaattctcctgcctcagcctcccaagtagctgggattacaggtatgcaccaccacgcctggctaattttgtatttttagtagagacggggtttcttcttattggtcaggctggtctcgaacctccaacctcaggtgatctgcccgcctcggcctcccaaagtgctgggattgcaggtgtgagccaccacgtcaagccgagatttcttctataactaaaacaccgttatactcatgcttgtatcgaccaatgaccagtgaaataggatagaatgtccagaaataaattcaactacatctggaaatttagcatgtgataaatatagcatctcaaatgactgggctaaagacagacattttagtaaatggttctggaagaactagatcaccatttggaaaaagatattttataccatgtcttatattacacccaaaaataatgcactagggatctaaatgtaaaaaataaaaccatacaagcactagaagaaaataaaagtgcatttttctttaaattttgtatagggaaaggctttttaactctgacttaaaatcagaggcaataaaagagaagattgataaatttaacacataaaacattaaaaaaattttatgctcaaactactataaatgaagtcaaaagacaactgacaaagtgcaaggaaatattcacaacatctagggaaaaggctgatatctctaatacataaaggaaaaaggctgatatccctaatacataaaaaactcttaaaaatgaagaggcaaaagatcaaaaagtctaaagaaatcttctcaccacaaagaaatgataaatgcatgaggtgatggataaagtagctactctgattggatcattatactacatagatatgtattgaaatatcaaattttaacccataatcatgtacaatcataatgtaccaattaaaaaataataatttttaaaaatgaggaacatatctatgaatttatttggagtaatttctagaatattctgttatgaaaaaatagcaaagtgcaaaagaatgtctccagggcacttctttcatatgagaaagaaggagatattagaaagtacttttgtgttctgctcatttgtgagaaaaacatatacaggagttaataggtaagactctgaagaaattagttatgtacatggattgagtagaaatgggttggaataaaggagaataacagcagagtagtatggatgaggaaggcataccttttttgtacggctttgactcttagaatcatagtaatattttacacagaaaacaaagtaaataattgaaatcagccaagtcagctttttttttttttttttttttttgaccgtagtgaggagtcatctagaggtttgacttggatgtagagaaagtttggtctctcttccttgtcatgtagtctcacggccttttcagtaacttccccctttatctctgcagcaagatatcctgtacttcttacacgatggttccaaactccaagagtataagagcaaaagctaccaagcattcctaatgtctaggctcagaaatcccagaacatcatttcctccatattctattgtcaaagcagtcataggctagcaaaaaaccaaaggtgtggaggatgacttttacctctgggtgagagaatggtttgtgcatacaggagggaaggaattgatagtgactatctttggagtttagagatcattgactgatatcagactatgtctcatgatgtagcctgactgtagaagagggaagagccaaatgactcacaaaggagcatagtctcttgtgggatgtcatatttacttttttgaaaataactgagcagtcattagattatcaactgaaatctttctgattgtaagaagatatgttactatttctgagattttctttgtaactgaaagtagatagctagtattgcaactacatagtgtaacataataaatctttttacatggtaggtcatcataatgttgattattcttgtgcccttgctaagttttctatttttaatcttcatacttttcaactattcttcattttcattgttagcagataaatgtactattctgtctatctactgtggccattctccaatttgccattgattgattcactcatttatttacttaacaaacaaatatttgtttgattacattagaaacacaaagatgagtaagaaatcatttttgcatcaagattagtctaacaaaggggaaagactaattaaaacacaatagacatatgacacaaatatgttggaaataggcttgtttggggacgttttaccaaagatatgatatttgtgccagaatttgaaggatttattgttcttcaagtggtggaagtacagtagagcattttaaaaagactcagtagcccaggccttggctcaaaggtctgagagtatgtctgacaagatgggatgctcagactagatagtgtgtctagaatattagtgtaaaattagaaattgttttacattttaaaaaattgtagtaaatataaataagatataattttccattttagccattttaaagtgtataattcagtgaaattaactccatttacattgttgcataaccatcaccactttccatctccagaacttaccatcccaaaccaaaacgctgtacccattaaacaataactttctattaccccttcctcaacctctggcaaccaccattctgctttctatctctatggatcaaattagaaattgaaaatttctgttctctagactgttattgggtattacacagtaggtaagtagcagtcctagcgagggagaaaaaaaaaaggatggagagtttgttgcttattatagctgaatttctactgcttggatggaaacatatgacccccacaggtttaatgcagagagtgtgttttagaagataaacttctagttcattatgtaaatattttttgatacattccaggttaattcttgcttgatattctatggtgagtgcattgagatattactcccaaactggccacttggttaaactagaatagtatattatttagtggtataataaagagtataattgctgagattttcatctgtttttattcttttgttgcagttttcttttttaaaaacttatacgaattttttaaattgcctgaggtgttgttcaggcatttagattatctttcttttcagtctaagagtaattatgaagcaataaaactgccagagaaaagtaaaagttgaagtaattaatattttattattttcttttatcttatttttctgtttatgttagtttgaaatcattgatttatatatgagtgtagtgatcagtagtagaataaaagtgccactttgtttaattcttacaatatcttaaaagaatgttaatagtaaattgctcaaatattagacattgtgcaaagaaattacaatacaaatcaagtgtcttgtgtttcatattttaaagttattttttataaatatgtattataaagtagactagtaatttagtaaggatatatgtgttaatcatactttgacttggaagaaacatgtattcactatctgaaaatttatacagaaagattgcttatctttctatttcttttctgtagtttcagttaattaattttgttagtaaggttgttattctgtcattacattttttttttttttttagacagggtctctctctctgttgcccaggctggagtgcagtggtggtgatcttggctcagtgcagccctgacttcctgggctcaagtgatccatccacctcagcctcccaaatagatgagactacaggtgcacgccaccacacctggctaattttttattttttgttgaaatgggatctcattatgttgcccaggctggtctcaaactcctgggctcaagcattccttccgccttggcctcccaaagcactgtaattataggtgtgagccactgtgcctggccctctgtcatttcttgactatattatcctcacaatagagtgacgaaaatgatggggaaccatcattttgctaagcactgattattttttttgcttcagatttaaaaaaatcaagatacagttcacgtaccataaaacttacctctttaaagtatatattttgctggcttttagtgtatttataaatttgtgaagccatcaccactatctaattccggatctttttttttttccccagaaggaaatcctccacccctcaactttgtcacatcccatttcccctcctccagctcgtagcagtcactaatttacttttcatctctataaattggcctcttctggacatttcagataaatataatggaaatatataatctgtgacctttcgtgtctggcttcttttacctagcataatgctttgaagagtcatcaacattgtagcatgcatcagtacttcattctttttgatggccaaatactattctattatatggctataccaaaatttgtttatacattcatcagttgatagaaatttgagttgtttctattttctggctattgtgaataattcttctgtgaatatttgtttgcaagattttgtgtggatatcttttcagttctcttggttagatacccaggagtggaattgctgtcatgtgctaactctatgtttaaccttttgaagaactaccaaactttttcccacagaggctacaccattttacattcctaccagccatgtatgagggttccaatttcttttcattcctgctaacacttataattttccattaaaggaaaaacctatagccatcctagtgaagtagtattacactgtgtattttatttttattttccaaatgactaaggatgaagagcatcttttcatgtgcttactgatcagttgtctttggagaaatgtctattcaaattctttacccattttttgttgatttatttagtcttttttattattgagttgttaggttttttcatattataatactagacctttatcaggtatatgatttgtaaatatttttttccatcctttgggttgtcttttcactttcttgatagtgtcctttgaagcacagaacttattagttttgatgaagtccaatttatctatttttaagtgtggttgcctgtacctttgttgtatataagaaactattgcctaattcagggttatgaatatttacccttatgttttcttcttagagttatatagcatataaatgtagtgttttagctcttatatttaggtctttggtctgtcttgagttaaattttatatgtgatgaaggtccacaaatgttagtttttaaaaatactcttaagtgtgagatgaaaaagcacttacagtttgggagctttttttctcccgggtcactttctcctgtttctttagcttcaatagaaagactctggactcagtgcttgcactgccttttgcctggactgctcttttccaggccttttgcttgactggctccttctcatcattcacactgcagagtgttcttctctaacttttctagctagatcagctaaccctttcataccccaccgagtttaattcttcacaactaaatatatctagttaattttaactttaagttcagtggtgtgagtgcagtttgttgtctgtatgacaaacccccatgacacaagtttacctatgtaacctatttgttacataggtaaacttgtgtcatgggggtttgtcatacagattatttcatcacccgggtattaagcctaggcttaataaaattggttatttttcctgatcctctccctccttccactctcctccttctgataggccccagtgtgtgttgttcccctctatgggtccatatgttctcatcatttagctctcacttataagtgagaacatgctgtatttggttttctgttcctgtgttagtttgctaaggataatggcctttagctccatctatgtccttgtaaagcatgtgatcatgttgtttattgtagctgcatagtattccatggcatatatatactacattttctttatctagtctatcactgatggcatttaggttgattccatgtctttgctattatgaatagtgttgcaataaacagacacgtgcatgtgtctttataatagaaagatttatatatttttggggtatatacccagtactgggattgctgggttgaatggtagttctgtctttaggtcttggagcaatcacaaccacagtggttgaagtaattaatactcccatcctggacgtataaattatacagtgtataagcattcctttttctctacaaccacactagcatctgttattttgtgactttttaataatagtcattctgactggtgtggtatagtatctcattgtggttttgatttgcatttctctagtgatcagtgatgtggagcttttttcatatgattgttggctgcatatatgtcttcttctgaaaagtcctgttcatttcctttgccctctttgtaatggggttgtttactttttccttgtaaatttgtttaagttccttagagatgctggatattagacctttgtcagatgcatagtttgcaaaaattttctttcattctctaggttgtctgtttacttttttgatagtttcctttgctgtgcaggagttctttagtttaattagatctcatttgtcaatttttacttttgttacaatttggcatcttcgtcatgaaatctttgcttgtgcctgtgtcctgaattgtattgcatatgttttcttccagggttttgtagttttgggctttgcatttaagtctttaatccatcttgagttgaatttgtatgtggtgtaagtaaggggtctagtttcaatcttctgcatatggctagccagttatcccagcaccatttattgaatagggaattctttccccattgcttgtttttgtcagggttgaagatcaggtaactgtaggtgtgtggtcttatttctggtttctctattctgttgcattggtcaatgtgtctgtttttgtgccagtaccatgctgttttggttattgtagccctgtagtatagtttgaagtcaggtagtgtcatgccctcggctttgttctttttgcttaggattgcgtaggctatttggtttttttttttggttccatatgaattttaaaatagttttttttctagttctgtgaagaatgtccatggtagtttaataggaatagcattgaatctacaaattgctttgggcagtagggccattttcacgatattgattcttcctatccatgagcatggaatatttttctatttgtgttctctttgatttctttgagcagtggtttgtagttctccttgtagagatatttcaccttcctagttagctgtactcctaggtattttatactttttgcagcaattgtggataggattgcattcttgatttggctctcagcttgactgttgttggtgtataggaatgctagtgattgttgcacactgattttgtgtcctgagatttgctgaagttgtttataagcttaagaagcttttgggctgatactatgggttttcctagaatatatctagttaatttgtttacttgttgactattcattgcatttcactaggatataagcttcatgaatatagacatcttgtatatctataccccatacctagaactgtagggtgcctgaaacatagtagatgtgcctgaaactgtgtgtgtagatgctcaataatgatttgttgaatcaattcaatgcattgtagtacagggaagaatctagcatttaccccctttttatgagggagacctcttgaaatcataactttagtatctagaaatcagaaaaccatcaattaaagtagctatgctaatctggaaaagaagtgcttcattttcttaaagtttttatatgttctgacgcactctcagatattaaaatgcccttctttcatgttccttggaaggactatctacacctagggagagctacgtttctcctcagtgtgttcttggaaatcataaaggcaaacttaatcccaaatgttgtgcatttgctctaagatctaacattaatttaattatggatatgaccaacaattaattcaaggagtatttattgaaagttcattgtgtgtaatacactgctggatgctgaggatggaaaaataggtaatatgccattaaagcagagttataactatacatttcattaatctttaagatagtaaaaatataaaatataaagtaaaataatataaaatgcaaaggtctgtagtagagtaattcagaggatcaaatttaaggtcagaattactgaatgcaaatttcaactcagctacttgctagctttaagggcttagatgagctaatctttttaactttcagtcacctcctttgtaaatgataacaataatattacctgccacacagggcttttatgaagattaaatgagaaaatgtataaaaaccacttagcatacacatagtaagtgtgcaaaatactacattatataaatattagagtttcaaatctgcaggtattttttttgaaacttttaaaaacttccttacttagctggcttgctttcagagtgtatcccaatttactggcaagcctagtacataggcatgtgctatcttcttaccagcctttcttccccaggtgtatagctctatccctggcctttttgatgcccaacccagctagcttctgacagatgttttcaatactgactgctttcctgaatttccatagtgtgtatttataatacacatatacctaggttctatagagaataaaatgtgccttgaaggcattccctagtgaacacaaataaaattagttgttaccagattaacacaacttctatctttgcctatcatatcaatgtttttgccatttacttggtggttaaggaatgtggtacttctcaaaagaagacatacatgtggccaaaaaaatagatgaaaaaatgctcaacatcactaataattagagaaatgcaaatcaaaaccacattgatataccatctcacaccagtcagaatggctattattaaaaagaaaaaaacagatattggcaaaaatgcagagaagagggaacacttatatactgttgatgagaatgtaaatttgttcagccattgtggagagcggtttggtgatttctcaaagaacttagaactaccttttgacccagcaatcccattactgggtatatacccaaacgaaactaaatcattctgccaaaaaaagacattcactcatatgttcattgcagcactattacaatagcaaagacatggaatcaacctagatgcccatcaacagtggactggataaagaaaatatgttacatatacaccttggaatgctacgcagctatagaaaagaacaagatcatgtcctttggagccacatggatgcagctagaagccattttcctgagtgaactaacacagaaatagaaaacaaaataccacatgttctaatttataagtaggtgctaaacattatgtacacatggacataaagataggagcagtagacacagggcactggggactatttgagggcggagatgggaagggaggcaagcattgaaaaactaccggaagggtactgtgtttaccacctgggtgacagggtcattcttatactaagcctcagcagcgtacaatttacccatgtaacaaacctgcgcgtgtaccccgaacctaaactaaaagttgagaaagaatgcaaaagtttaaaaaaggaaaaaaaaaaaaaaaaaagaaatgtggtagatgtgttcatactttttagttgactattccagacctgaaagaatacaatgtaaattgaccataaaaaatagaaaattttgagaaagagacagattttgtgacattggtgtaaatgacattggagaatctattgaatcccagtaaaaccactgatacgtgaggatttgacagtttacaattgaagcagaaaaattatcaagggtaataatataatgatgcttcaaaaggaactgattggaagaacaaaggattaagagaaactatttggaaaccagataaacccttgaatatacctgttagaagatatctgttacagtcttctaggtgttaaatgtgaattgacagatactatatcagactatcatgaagtaatttcagaaaaatcaacaaaggacatataactggtttattctttgatctaaaagttagtccagagttataattacaactaaaattttgttaaatatgacataaagcagcttacttttatatttctccaagttccttttcaagatgaaatcgttaataagtggatcaagttaactttgtaaggaccaattagtcttagccaaagtagtatctctgtactactggttccttatttgcctgtgctcagcctatctgttgggatacttcacttaggattgctttgaatctgaggtctgtattaagcccaatgtctattaactatttttttgtatcccatgatccactggtctgtactaagctggactttaactggtctgtactcaaattgtgatattaatacaaaggattgaggaggttcagattcagactttgatactcagcacaaaggtaagatggaagtaatgagattcaagtgactgaatttggtagttcatcctatagaatatgattgaaaggtagagtaaaaccagattatgaaaaactttgtcaatctaaagggtatatgctttaacctacaggttagagtttctcaaattgtggtccacagaccacttgcgttgaaatcacttgtgatatatgttaaaaattcaaatttctgatccccatctatgaatcagaattctggggctaaatcctaggaatatccagttttgagatatctttatgtacctcttacgtacattatagttttagagttattgttaaacctaagtagtttgataaattttcccctgcattttattttttaagtgttgatgatggtgtaacttttgtcacaaaaaaacttagaagcgatgccatatttacctggaattttagcttcattaattgtttctttagataatattccaaagcttattctaaagataaatatgttttatatgataattctgtatatgaaatagtttaaagagagcattagcacttaattccatgctttcaggattttcttataaaaacaaattttctttgaaagtgatatctaaattttttcagtttccccacatggaaactcctgctgttatgcaacactgaaataacaacattgttttcacccattaagataccgctgcaagatattgtgaattggctcatttgccttaaattttttttaacaaataaggcagtgttttgagttatgccagatgtacaaatgagagatttgagtgtacttgtagaatttaaattggaatgctaatgagattctgacaggcagaaaaaacaacacagcctacattttcatctgttttattaaagtcattatttaactggaaaaacacattatttagagctatttatttatgtggcatttgtaattcagctcttaaattttatccaattaaagtgcttctcattctatttcacttaatgcagtagattgttttgtgcattcatctttttctctgtttcattcagtggtagagtggcagtaactcaattgaatgaatgaatgtgccttttttttaactaatgcttacatgtgctgcttcatgctgtgatgctacattgacatctttattttttgtttgcagtaattccattgaaatttaatggtacattattatacaagattgcttatggttatttcatgctttggttactttactaaaattcccaatatgtgaaagaaaaacataatgttaaaaaaactccacatttctgagaagataaattgatcttagagataattgaacataagacaccaagccttaaaagtacttatttcaacaaagatatacaatgccataccaaaaatattgctttttcaaaagacttttatttattatttatttgcatttttccatttgtatagttattttaaagaaaggctttttgtgaatgtttgagattgcttaattacagcagctttttggtttcctttatttatatttatctatctacctctcagatgaggtttaaattagagtttttaaggttataggggtttaaaattttatgtacatgtacaaaatctgtactagaggaagaaatactagtgcataatttcaagggatagcgtgaggctggctgaggtcagacccatgatggaatgcagaaattatgagagggtatagaagacaatgtgtttccttgaaaaggcaacttctgtgaagagagtgaaatatgtgagtccagaattgtacagatgtcatcatgaatgtcagatctctcaactgtattctatagtgggtttaggattcttatattgtaagaaggctttatatattttaaacagcctgatggtattcttatgaaaatctaaggtaaaagaagctcattggcatagaaactatttcagttaatgttcaatgaataaaatctctatattaactggaaattgaacatgtgactgttggtttcctgacatttacataaagcttcactcaagagggcgccattaagcagcattaaggaatttcatacacaactgtatatctctaaaacttccataagaggtaggctcttgaggtgacaaaaaggacagcaaactaggaatcaagaaactgagttctggttcagactctggcactcatgaactctgtggacctggatatgccactttacttctttaggctctaattcttcatctgcaaaatgaaaagtttggtgatggtttctaagagtactactaactctgtaactctgtgattttacagttcttttatttaccaatgagaagcccagacacaacatttaaatgatagattttatcacatctctatgccttcttaatatggtgtccagaattatttttgaagatacagtatttaggctgaatttcctaattagtgtttagaatacttacagaaaatagcttttgtaggtatagctaacttttgattatccatgctaacatgggataacatgtgtaattgaaatgtgtatgaagtcttcactcctcattttctcttcaaatttgtctccttttggtaaggagacaaatttgaataaagttgctgaaaaatatgggtttgagtttcattttcagcctgggcagaaaactgcctttagcatctttgtatagctttattttacccacaccactttgctgaggaaaagaaaagtattcattccatatatatatatatatatatatatattttttttttttttttttttttttttttttccagagtcttgttctgtcacccaggctggagtgcagtggtgcgatctcggctcactgcaagctccgcctcccaggttcatgccattctcctgcctcagcctcctgagtagctgggactataggcgcccgccactacgccgggctaatattttgtatttttagtagagacagggtttcaccgtgttagccaggatggtctcgatctcctgacctcatgatccgcccgcctcggcctcccaaagttctgggattacaggcgtgagccaccgcgcctggccataggattcattattaaaccataggaatgagcctcattttatcctggttggttttttaaatctcagaggcacattacattcgtgtgcatactgtccacatctactttacatcttgtgtacgtattgcttcatatatgtgcctcaggctcttgtgcctccatacctttacttgtgttcttcctgccatattttttactcctgttgccctcagacacagaagctctactcatcttataaagcccagctcctcagcccttgatattttccctaagcatgtgagccttattatccaacagattgattccagattctagtgttaaaattcactagctctctgatcctgagaaaattaccacagtctgaccatctgcaaaatgcaaacaattcccaaatctcaggatcgtttttaattttaaatggtatataatccggtcattcaataaatatttaagtagtgatatcacctatctgtagaacaaaatagaccaaaaactctgccctcacagaacctataccctcgtggagataggtaaatacataaaaacaaaatatatattttgagaaatagagaagggtagaggagagggagagtagagaatgcagaaagtggagaaactattttaaaataggatggtctgaaaaggacttcctgagaagatggcacttgagcagggacctggaagagccagggaatatttgaaggaagagtattccaggcagagggaactgcaagtacaaagtctctgaggtgtgtgtatgcttggcatgtgccaaaacagaaaagaggtcagttggctcatgcagagagagatgaggcagaaagaacaagccagatcatatagggtcttttaggtcaattttagtgaggactttgccctgaatgagatgaggagccatcagagggtttttgaagagataagtcacttgatctgacttacctttttaaaatactgtgtggcttctgtatagtttgtgggggagggggagggggaggggcaaagtaaatattgattaagctattggttgtaatataccaggtgagagctacacatcactacagagtctttcagaggatctagacactagtaggcattctataaatgttagtgccttcattctcactttctcttcttcatattcctagttggaagttttctcttcttctttgggattatctattatgacgcataccattttagaactagagttatctgtgtatttttttttgtttctcctactaacctaaacatttcttgaggataccttcttgaggctcagttttatctgtctttataaatggatcctatcccagctcaggatagggttatataagtagcaggttgagagtgtgtttgggacctgatgaacagcaacatccaagaggagaaggttagcaagtgtgggaggatagggaagtaacacttcaggagacacacgggaggtgtatcttaggatatattagcaaggaatagtgggatactttaagtaagatagatgtgggaagaggcactggtcctacactacatgtgggagatgccaggacagatctagttaggcatgctgtttagggactttggccatcttcatttgtgattcatgaagatgtgtagctggggtctgaggtgacatagtgaagtgcccaaacaggtggataatgcaggcaaaggagtctccccacaagggccacttgggagtatagataaactgctcgttgatctctgggccatctgtttatgcgtagtaatttcatagccttcacagggggattgaggtagatttggcaaattactggactgggaacttgtgatggtgctgtaccctttaggatttttgcttctgcaagtggcagattacccaactcaaaggagctgaagaaaaaatgatccttggtggctcatctgactgaacaattcatagggagttattgtcaaacagtttaacttgatccagctgcacaaataatgtcactaagggcctggattctttgtaattctctctgctttgcctttgcctaggagcatcctcatctaaatagggggctcctggcaccttcagcctgacatgttacaaatatcttatcttcaatacaatcttatctggtagaagaaagcctttttggccatcacacagaaactctggacttcagtctaattgaaccatcttaaagtgtgtacccattcttaaccattcatttctagtgagctaggattacattgatgaacacaggcttcagcctcttgcctaatccacagagccagggatagaagaagttaccccaaaatatgtgggctttgtattgtggatgtataaacctaactgaaaattagctgcttttattaagcactatatgaaatgggatgtggatttgggcccagcaaaacagtagatgtccactatgggtattatattatcagggccccagaaggaaacacagttcagcttagatagctcaaaagaagagactttaatgaagggactacttacaaaggaatgggcagggttaagggcacaaaacaatggctggtgagcctcctagagaccagtatcagtaggaaggtattaccaaccctaggacctagggatcaatgggaagaagtagtgttgcccgggtcaagtaagaacttgagtcctgcaggaggagctagagctgtagctgcggagtgcagctatagtcagagatgaaacattgattgaagcagggtgggaaagagaaaaaaataccctgacccttttctcttttcaactcctaatcgcctgctgtagtgcccattggctcaattggaacgaggcagaaatctctaggggtcagcctcctgagacacatagtggagcagaatatggatcttagttgaggccaaatggaaaataatgagcacagaaaacaaattagagtctcagtcttataatagggaaatatattgggaaggaagatagggatgaaaatttaggggacagaattttattggaagaaggtccaattgaaggagtgctaacctttcacacagcgcagattaagagagttaaattgttaaaggggttctgagctccaggtcagtctactggagggactgatttggttgtaactcctccttgtggtggggaataggtacctactcactcttaatgctccatatcagaatttgcctgggaactggaatgtggctgctcctgaagacatggatctcagaaggtctgtgggtgggtaagtggcttatgacgggaacagaacaaatgatacattgttgtgtatcaaggcagaaaccattactacaacatgtagctgccctgagttcagttgcttttgtttatgttcctgcccagccaagattgggatcacttcctgctgagacctgacttgaaaatgatgggcaaatcttggcccaaatagctaactagaagtgaatgagggtagccctaccagtcttcatctagaagccatgctatagggataggggataattgctctcaccagctgctgagacaaattcataagtgacactgtggcgaggggtcaaaaacaacccaggataaagcaggaagctcaaattgtggctaacagtgaggaggcacacaaataacacagctctaactccactgaagacagggtaagtgacagcttcccctgagtcagatggagcggggataagtgtgccttgatgcgaagtgggaaaccagaggaggacctgactgagcaataaaactcttggctgagactaaaatgatttcaaagcagaacaagggtgggactgtttggtagtggaaaagaaagcttggtttgatgcctagagagagaattacatgatatgaagaaaggtcattatttattacctaatcaagcagtgtaaacataccaacaagcttgagacagtctttatctagcattattagatgtgcaattcaggtgagagaatattaccaaatctaacctgcttatcaacacttgtgtaatgagaacataaaagtgaatgaaaatgtatctagtctgcaatgaagtggtaatataagagactcagaagatccttttttcctactttgtgggattgagcctaaatttaacttgaattatttttagaagggacttcttatttagcctttttaaaagaagaatttatctattaataggaaatatgcattttattattaaaatgagttttattttggagtagttgggaaatgtggaaaggagaaaccagttgcaaaaagggatataaaaagaaagttgtcaaaaatgtttaaagatagagtatagcacaccaaaccccacagccatctgcccaggaaactctccttgttgccttgttttctctttcatttgtgtgggctgttctctgcttaggtgcttggaatgtccctctgatacagaaatggggaagggaagtgctgggaagggaagggcatggtccctttcaatgatacggaaggggagaagggtgtggtccctggctagggctccgcctccaggcctgtgcccacaggtctagttgaggacaggcatttttgttttcctgcccaaaacatttcctaagaccaccttggtctgccacgcccgcatcctgtgcctataaaaacccccgagaccctagcaggcagacacacacacacaagcgactggacatcaagaagaacacatcagaagtagacagaagtggctggacattgagaggacattgaggggagcacgccggatgctagcaggctgccgactggcagagcatgcgaagtttggctggggcagttgagggagagccccggctgccaagcagctcgactctaggggaaaaccaatctcctttctggctcccccatctgctgagagctacttccactcaataaaaccttgcactcattcttcaagcccaggtgtgatccgattcttccaggacaccaaggccagaacctcgggatacagaaagccctctgtccctacgataaggcaggggtctaattgagctaacacaagacacctacagacagctaaactaaaagagcaccgtgtaacacacacccactggggcttcagctgtaaacattcacccctagacactgctgggggtcggatccccacagcctgcccgtctgtatgctcccctagaggtttgagcagtggggcactgaagaaatgagccacacccccatcacactgccctgtgagggggacaagggagtttttcctgtttcacctcctcccctctctccaggccaagtcttccttgtactttaagattttaggcaatttgactctcataccttctaatatcctcttcacttcaatgccaccccagatagatctgtgatatgcaaatccgtgttgtgatgcacttatcacagtgtactgacatgactttctgatctgtcttctccattagactgtcagccatttgagggactgaggcagtaaaagagtaggtatttatatggccagaattacattaaaattacgtttgttataatgaagtagaatatttctgtgctttgccctttccactcactatcagatggcttcacagcattcctctggaatgttctaaaaatagtctgacaccaaatattagtttgaactcttgattataagcaatagaaacccaattcaaaatagcctaaataaaagggagagtgtagaatatcttggtgtatatttcagcatgactgaggcatgatggaggcaggcatacagctaggctttggaaatacggctcacatgcttttgggactctggctattttttattttggcttcttcatctatttgggtctcctctttctctgtagaacagctttctaaattcagaaaatatggttgctgacagctcttagttttacataataaagctttgccactacagaaaaactagaaactgatttgagtttcctatctccaaagttcatgggtcctaggaaatgtaccagtttgggccctgcccaattatcagatgctctcattgtaatcagatggagagggtgagtagttcctgcagccaggcaaaatagtacatgctgtacacacggcatattagtattatgggagaattacatttagagggctctgtttgccaggacatatagttaagtccaggccatacatatttatgggagaagacaagtgctccaaacagttaaataaacttttattttggcatttgaaatgcataatatcattattcttatgggacatttaccatctttattatgttctctattggctagcattaagatgcattctttgcattcttaagcataaactaacaggagcatcaagaaggaaaagtagcctggataatgaaaaaagttgacttgggagcaaaactatgctgtggttaattgataaagcagaggagtttctgactaaccgaaaatatttttagtcttccaaaaggtattactaacatcttgcaagtgaatttttaaatataactttcaactgaaattttcttaccagcttactgtactgatccaagggtatgacagacattaaagtaaaagaaactggcatggttgctcatgcctgtaatcccagcactttgggaggccaaggcgggcagatcacctgaggttgggagttcgagaccagcctggccaacatggtgaaaccctgtctctactaaaatacaaaaattagccgggtgtggtggtgggcgcctgtaatcccagctacttgggaggctgagacaggacaattgcttgaacctggtaagtggaggttgcagtaagccgagattgcaccactgcattccagcctgggtgacagagccagactccatctcaaaaaaaaaagaaactggcatgtttgctactcttaacagagaagtaggaagtagatgtgtttaaagctaaacaaccttttaaaaacatcatgtttacagtgttaaaatttgtgtgcatgtgtatagcttatgtacgctaaaggccgatcttagatgtaaatcaaatgggtatgattttagaaatgacacattacattacaaaaaaaaggtaggtatgtaaaatgagcttaattattttcccttttgtacttcacagggtggggaatggtggagaatgctgagtggtgatttggggccataagtccaacattctgcctactttataacaactttattgcaggctggagggctgtgtgtttgtgtgtgcgtgagagagagaggggagaagcgagaaagagagagagaaggtaagagggagagagagagagggagaggaaaagagagagaagagagagcccttggtttagttattagggaagagcaaggagatgctggtaatttgatatctaatagtttactgacttttctctttgtatacacattttataggagtaaacaatggagaatgatgtgagatggattacatgaccaaacattgcttctaatttgaatctatgagcctttgaagccagatataagttgatgtatcaattatattagtccagagccaatgtataatttctgtatcaatcactgtgtttcttattattcggttagaaacttgattttaccgctttcagaatctaaaactctggttattcatcaaatggacacaaaatattaaaagaaatagaccttttccatagtctatgttaataaacccaggtcatcaatctttgttcgcatatattatgtagtcccctggtggacagtgtgttatttctgtttctggtttggtaacagacaataatcaatctctctcccttgcccccacctttttcctttccagtctctgatccttttcctccttttctttcctctctctttctcttcctctctccttaaaacatgcttatctgtaagtattcatgaagacaaagtaccctttgtattacctttgtaaataatctaaatgagcattttctgcagtgatggggattgctgacctcaaatataattgcttttatttcgacatcttaaagctaaaagatttcttttttatcatcataatgcaatttaaatttctctcttaccttctcgccttttctcttttttctatatgtctttctttttccctttcttgtcctccctcccttccttcctttcttccttcctttccccctcactactctttctttaaaaagcatgacatttgacctttggttggtactaaagcttatcttcagggagaatgtgactttgaaaattagttatcatacatagaatacatacagctttttgcctacataaaatgatggttctcttcaggaactcttgattccagtctgctaatattgcaaatctaactaaaatggacattgtctttgttgtacgtcggtgagtgacaagggttctgcacttagagcttttgctagaaaacctggagggcagccagccaagagctctgtaatagacttgaagaagttggaatctgtaaaaaatgtttcaggaagaaaatctttcagattagacagctgcatagttaacaatcagtagctccagagaactaataattagttctagtcaattaaaccaacttttagccttatgacagagaagatagcttgcatagctaaaatgcacagtatactcttaatttatgctacccaattccttaccaaaatatttttgatttttgtttgttttgtttcattgttaacattttgttgtagttcctgttgtgggttgtttggtaggttactatgtaccatgttatagtatttttctttttcatgtagtattctgttataagccatttccatgttcttaattttaaatgactgcatataattttacagtaataattatgtaccaggctaattattttacatatattaattattttagtctttataacagttttttgaggcaggtactattattatcctcatttaaaaatgaaaaacaaaaatgagatacagggaaggtaagtggactgttgaagattccagtgccaatacatggtagaggactgaatttgtgatggtttacttacttccttcttatccacctattcttagatattatgtagtttcttatggtatttattgtaaatatcataagaaccaatgtcatgattagtaaagtgtttcccaatagcaaagacattcttgcaaggcagaaattgagaattgaattattgtgtttttatcaataaattatagttagactcataaacctgcatattttggaatcaacctaaatgcccattaacgatagactggataaagaaaaatctggtacatatataccatggaatactatgcagccataataaacaacatgatcatgtcctttgcagggacattgatggagctggaggccattatccttagcaaactaacacaggaacagaaaaccaaatatagcatgttctcataagtgggagctaaattatgagaacacatggacccatagaggggaacaacacacactggggcctatcagagggaggaggttgggatgttgggatgagggagaggatcaggaataataaccaatgagtactacgcttaatacctgggtgatgaaataatctgtacaacaaacccccatgacacaagtttacctatgtaacaaacctggacatgtacccctgaacttaaacaaaaaacaaaaaacaaaaaaagatttcctcctctttaagagtatttccttaggataggttcctagaaataaaattactgaatcaaagttttaaaaaaatttaaggctgttgatacacagtcccttaatagctttcttaattgttggttacatttctgcaataatttatgtgtgcacagtttggtaaatcattgtcatctcttgattttatgtttttaaatctttgctaatgtgacagctaaacatggatttcttttacctttgttgtaatttgcttctttgtatttgaacttcctcttgtgtgaattattcatgcctttttgcctgtttttctcttaaagttctagtcttgcttttgtatctttgtataagtcctttaaccaagatactaatctttattatatttgctggtaatgtttttttttttttagcgatttgtctttttttggactattcctttttacctatgaaggatgtttttgtttatgttttttaaacacaattttacttcttttgtgattgctgctatttacaaaggcctttcatttatgagattaatgctaaattatctttttctctacttgcactacagatgttttccttttgtgttaaatttttaacgaatctggaatttattttttatggcatcagttatgtatcagaattacaagttagtagaaaaatgtttcaagttacattcttctctttcaatgaattgattaaaacttggaagaaaggccttggataatctataaactatgcaatcagcttcttaaatattcttttctctttgaaaggcagaaattgagaattgaattattgtgtttttatcaataaattatagttaggctcataaacctgcatattttgtgctttaaaattataatattttgtcttttgctttcataaagaaatcttacaaagggaaactagaatctagccttccttgttctttgaggttctatgtgcctcactgatgatagtttattatctctggacttctgcctgttatttaaaactgagaacaagacaggcgtggtggctcacgtctgtaataccagcaccttgggaggccgaggtgggtggctcacgaggtcaggagttaaagaccagcctggccaagatggtgaaactccgtctctactaaaaatacaaaaattagccaggcgtggtggtgggcacctgtaatcccagctacttgggaggctgaggcagagaattgcttgagcccaggaggtggaggttgcaatgagctgagactgcgccactgcactccagcctggtgacagagtgagattccatctcaaaaaaaaaaaaaaatcaatatgtattaggaacaaatattaaaatctaaaagtgggatggatatatatatatgcatgtcacatataacaatatataatatatattgctaataatatgtaatttaatatttcaagaaaagcctgaccatataaaagtgttaaaatattggactataatactgagactcctaaataatatgtaactactatttccaagatgatataaataggagtcttttatcttctggaataattcttcttttcgtcattttactactaattatttgataacccttatttgtgttttagctgcatattaaaatgagtggcaaattaatatagatataatgatttggcagtgttgaataaggctttttcttttcttcacccaaagtgattgtatttaaaatgcatgttaatcaaaattcagtgactcatctttgaggtttgtttattacctagattcattggtgtcaaaactgtttgcttaagatttgatccacacccaatttgtacagtgtcttttgaaatacaggaatttggaaattttattagattagaagaaacacttctgttttatagcctactttccttctactttagttatttttactccatgagaatttttcattaaaaaataattgcagtccttgacacatcaaagacaacataattactgaatgaatctccataattatgtctcttttgtaacttacttttgcttatttatttttattgttcaaaagagcacactacttagaagggaggcagaacctctaaatcagaagtaaacaagaatataagaagaaaagaagtgctataataatgtaggtattctacagactacctagttgcagaaagcaatggattcttagttcttgaggagctaatggaagagatctaaaggaggtagaaattctcaaacatctgggcatttgttagaacttcctttaaacaagggtagtactttgggagaccaaggtgggtggatcacttgaggtcaggagtttgagaccagcctgaccaacatagtgaaaccccgtctctattaaaaatacaaaattacccggatgtggtggcacatgcctgtaatccagctacttgggagactgaggcaggagaatcacttaaacccatgaggtggaggttgcagtgagctgagatcgtgtcattgcactccagcctgagcaacaagagcaaaactccatcttagaaaaaaaaaaaaggcactaactctattaaattatttattttttctttttgttgtgtgtgtgactgtgttatttcaaagattgtcttcaagttcagaaatttcttctgcttgatcttgtctactgttgaagctcaattgtattttttaatttcattcattgaattcctcagttttaggatttctaatgggttcttttaaacatctatctctttattgaatttcttattcagattgtgaattgttttcctgatgtctttgcattatttatctgtgttctcttgtatctgagttcctttaacatcattattttgaattccttttcaggaatttcatagatttttttttctttgggttctgttgctggagaattattgtgtttctttggaggtatcatgttttcttgcttttttgtgtttcttgtgtccttctgttgatacctgtgcatctgatgtaacatttatttcttccaatttcatggattggccttcactgagaaagatttttttctataatcatatccatagtgtttgttgggtagggtgctttggttttgattctgggtaagcacagtagtgtagtcttcatatgatttctttagctgtaatcagtgtcaatggtgtgagttccttagaggcttaggctgtggttgttagtggaggctgtggtgaggctttactggggacaggaatgccaggtgggctggtccttaggcacccatggtggcagtctgggcatgccagtcctcaagcccttgggcacccatgtaggtggcagtggtggcaggtccaggtgggccagtccttgggcctccaggtgatgtgcttgggtgctggtggtggcagggtgggctaggcgggcaggtccttttgcccagtggtggcagggtgggttaggcgggcaggtccttttgcccctgggcagtgtgtgtggcatcagtggtggtggtagctatggcagcttaacccttgggcccctgagtggtacatgtaggtgccagcaatggagggactgtcctaaggcccagggatggtgtacagttggactagtccccaggcttcctgaaggtgcatggcagacctgccactggagggggtggggttgctgtcaatagcagtggccctggtgggcaagtagctctcaggctctggagaatgcatgcttcaacttcctttgtcccaggggcaggctccctggtgtcctgcaccagctgttctcttgagtatcggatactgtgtgggctagagttctagggacccacatcactgtgtctagctggtgttgaagcctgcagatttggggtaaatgtgaggggatgtcagcagtgctccagagatgtggagatgcaggagctgttgggtcctagagcaggacgtagtctggtgggggctgagctcttaaaatggtgctgtaccatagctgcttctgtctgggtatgtgtgtgtgacccagtgtgaactcctctctgaaacaatgccatcatgtggactccaggaagctccttatactagtctcagggcccatgagggccaataagggtctgcaatgggaatgtggactgcttgggaatctctcacataccctttcctcatagtggaaagctccttctggctctgaactgatcccggccaggccagctgtttcacatccctttcctaccatgtctcagaggtttcttgtcacttctgtgctgaattccagtgttctgtcttagaagctttattcaaaatggggttatctactcactgttttggtccttctttgtgtaggaggcaagtgcctggaacttctagtcagcctcttgaacccttacctcaattattattatcattttttaaagaactgtagagtctcataaggcgtagaagtgacacaggacctagtactctacataactatggattagagagaggaatttcttcaagaagtagaaatgatagagaaggctgtagagagaggaaatgctgtaactagctacatatatattctggacttaaaaaactgtttcagatttcaaaaatctcagggaaaagatagatttgatcaaatatctggaacaggaaccctgattggaacaggaatctgtattgtggcattatttatttctctggtgcccatagaagacattatttaagtgacctcaataatctctcatttttcctgaaaacatctctggaatccttcttaagataatactctaggtagttactactgatgcaggatgttttgctcctcagctcagctaggtttggtttcttgtctcatgaccaggaagaaataggcaagtggacattgaagaatgagtggagtagaatgtattaagcacaaaggaaacccctcagccgaaagaggagttctgaaagcaggttgccggttgccccccttcacagttgagtaccaatactttgttataaaagctgatggggctgggttccctatttgtataaggtgcaaattcctggtggctccaccccacccttccggtgcgcatgcgggcccttagtctgacccacttcacattgatttatttcccttactgtgcttgtgttaagggacagaattttttactgcaggcatatttaggcaagcctcctgtgctaatgaacttggtgggttggaggttctcctgggaccctgccctatctgcctaggagagttctctgcctcctgtctctgtcactaccatttgattgtctttgcaggaagtggagcctgacaccctagtgtaggagaaaaatagctcaaaatgatacagctttgaatggcttgcctctctgctatagatctattcatcaacactcttggatccaatagttaaatagatacaaagccttctaattcttttattattgagcccatatttttattttatccatgaggaaagcttgagaaatgttgtataatgttcagttaaaatctagatgacagtgcttataggagtaactaggtctgttagtttagtaaaccacccaaaaaggtaatctgtgtaatgtgtagcattggttctccatcaggggcaattttgtccccctaggggatttagcaatgtcggggggtgggagtggggttgtatgctattgacattcagtggacagagcatagggatattgcaaagtatcttacaatacataggatggcccctcacaacaaagaattatccagtctaaaatgtcagtcataccgcagtttagaaattctgatctagatcactggttcttgactgggaacttgttagaaatgcaaactattgcattccgctgtggaactgatggggcagaaactctagaggagagtctcagcattttatcttttaaccaacccatcaggtgattctgatgtaccttaaagtttgaagaccagttgtgggaccattttggcatataaaaacgttcaggaaatatttattgagcatcaagcttggaccacgtgcttctctaagtgctcaaaaaacagtcttttcatagtttgcttttgccatcttacctatgatcttgttatttcttgtagttctcaaattcttctgttgtctaacatgttgtttgatatgtttgttaaattgtattaaatcgaattggtagctggtctttttcatcccaccatcccatgaggcttttttttttttttaagtcagttacttgcttgaagatgtagtcgtcatggttatcaatgttttaggcctcataaagatggtagggattggatgatagaggcaatctttgattcttaatagactagcaataacatggtcatatttctaagttccaaaattcccattatatcaattttaccaagcatttcctacttgctaatcagaattaggaacatatttcttaactgagtacattgcatacaagaagagatttttaaaatttgtcgaattgaatcaaagacaactcctaggtaacttggaagaatgatagtgataataatagaaaaaggaaatttaagagaaagatgggcaatatgctgagttattttgtacttagcgaatatcagatggtgatacacactaaagtaaatatattcatccatcaatggaatcaaaagcacaggtagaagggacacttttttttttttgagatggagtcttgctctgtcactcaggctggagtgcaatttcagctcactgcaacctctgcctcccaggttcaagcgattctcctgccttagcctcccgagtagctgggattacaggcacatgcccctacgcccagctaatttttgtggttttttttagtagagacggggtttcaccatgttggccaggatggtctcgatctcttgacctcgtggtccgcccgtcttggcctcccaaagtgctgggattacaggcgtgagccactgtgcccggccagaaatgacacttcttgactgacgagggaagaataaaaggaaagtgacataccaatacaaataaattttgttgtaggaagcagttagaggaacttttaaataatggtttcagttgtttctggaatactttggcacgtcagtatctgctacattgccaaacttccttagcttatatgagaattctgtgaggaattccttgtgaaaactcgactgagggtaaaaaattacagataactcagaaagctattcggttatgaggcagaaaagaactgctacaccatcacaacccctatcaacagtgacagcgaagaacattaaataagagaaaaactttgaagacatataactttaggcagtaagtctcattatccacttagcctggaaggagagatagccgtgggtcatacaattccaaggtttgggttacccctctgggcaaaaaccttatcaggaagcattttttgaatgcaaatgcaaggtacatgtagtgagtcctggaggaaggaattttcaaatgccagccaaggtagaaatacagccttattttctatttgcatttgtttattgctaataattgtcttcttttttcctttttaaaataggagttgaagtgaaaacaatttctctgttggaaattgatatgttgatagtgtgtggttactgctgaactagaggaattctgaacacttcttgaggattctggacttgaagaagagtaggtccatgatgttgatcctggatgtagttgttgaaggtgatttggggtcagcttcctttggggagagtagtgattatattgtagttgtagtggaatagatggattacagggtcttgggtatattgaatcatctccctttgtggggagtgattatattgttcttgtagctagatagttggattgtgacatctttggatatacaggaaatagtggatgttcatatatggggcaaggccaggggttggcatgttgtgggtacctttctgggatagtgctcagtgcatggccattttctttctctaggacttttccctgaaacccagggtggagttcagttggccgttagcaccatatagctacaactcagttgtcacaactgaagaacccaagagttcagaacagattaaagctgcactactcagactctcatgtggaaatctgaaattgatagtagtgttacagagagtaggttcccaaactacactgtagagtttcctatagctgatttggcttctgttttaacaaaagtagttgttgatctctttgtgcatttccatcgagactgcccagtgttctatcaataaagttccctgtttgtgctgattagagttggttttctgtttcttcctaccaagagtcttaacttaagctggtcatatgaggtggtatgagcctcaaaaagggctgaatacttgaattatgacagtagactgtagatacagaagtggcagcaaggagcaagatacatgttgatccattctcctaaaagtagaagaaaaaatgccttttattggagagagtggggagggatatggctcattttttaaaagacagttttctcgtactatgagaagaaagaagtagtgtgttaaactcaggctgaggatgttagctagtgtgctcctaagagatttatgatttctggaggaattgagtaaggattatatagcaaatgttctgtaaatatttgatgaatgtggaaacaaataaattgaggagaatgatcccttctcattataacctcagtaaagaatgctgtgtgccacaattggcctgggcttcccaaattatagcttacttgcataatcatttccatggtaaaattgccaaagctgccattctctctgggttcatgttcttttccctgccactcatttttggtcaatacagtactattttagtattgaagtttagttagaggaatttgagtaacttttacttttagggagaagagtttcaaggcctctatctcttccctctcagaagctccaggagacaggcaattttttttcatgatttcaccaacaaatagcaagccctctctctaagaaatgtcaatgatgctggaaaaaaaataaagttccattttcatgtgatataacatgtgatattaattagggtaatactagccatgaaaagaatagacttcaaaatataaaatggcttaaaaccaataatttatttcctgctcattacagggaaggtaagcagattactaggtggcccttcttgtgggtcatttagggactcagatagggaagcctaccataatcagaatgtggtttccaaggttaccctaggtactgtagggcatccgagccagacataagaggaatgagcatggggggttttgtctagagtggaacatagcacttctcttaactttcagttgactagaattcagtctcatagccacttagtcgcaagggaggcttggaaatgtagtccactttgtgcccaggaaaatggaatatatactgtatttggatggtcaactaacaatttttatctttgtggctactcactattattcagacctcactttccagaaattctgataaatacaagtttactgtattttgaaaaaaagaaaaagttggtaaacttgcctttcttcacagtttctgtaaattccatgacttaaaaataaagctcatattgagggaagaaaattaatagatttgaattagctaaattatatacatatgtcttttgccacatgtactgagaatcgctaaacacatttttcatattcaggccttgttatcaagctgtaaaattctaagctaacaaaaaccatccttcataaaacaattctaggaccaggaaggataagtcaaactgggatttgcagattgtgagtaagtacttaagtgaattggactagagaaaataccaggaagctagcagctggggtaatgtcagaggtagaatccacatgtgcagctaaaagtaggaacctatgtcggcacccaaggtgagagacagttggaggctggatgccttatttatagggactttgaatacacttcctgctgggcagcagtgaagcccatggtgtggacagctgacagagaagaaaagcaggtagataggctcacctagatgaaggcaggtttgaagagatggaggccctacacagcagtcctgagaagaattttttttactaattcaggattagcaaattgttttcctggtggtttttggttttgaattactatgttgcaaagttggtaatcttagtgagaatacaagaaaacataaggttattcacattcaggtttattttgttttgtatccactgtgatgattaaaattgggattaaatattcaagtgtacaaatacaattaaaattgtaacctgtgcccaataagagtggtaaaagtgtaactcagtcaaaagaaaagaagctctaagctttggtgctgtgtatcacctatgaattaaaagatatttttcagatgattggctgattggcgactctggaactgggaacaagttaacgctgagaacaccaagtacagtgcgtcatgtaaggggagggagacgcttaggattacatggttagctaagaccatatgcattgaggtttcaagtctacaagcatgatacttttctttcagagtttgttgatactgtgtaagggtgtcaatcattggtacattcataccagattgcatggttttacaagatgaggaattatacagcaaatgaggtaaacgtatacattgtggattcctttataatactgttctatcaggaaagtaattgggcaaagaagagtggttagcaattgaggttctagagtcagaactgggctcagatcctgatgttttcatttcctagctttgtgaccttggacaagttatttcacctttgtaagcctttgtcatctttaaaatagagataataactatattcaaagcctctgaaaatcaaaagttttttttttaactcatttggcagcaaaacttgatgtggaataatgacaatttatttgttgtctttatctcatttaatgtgcatctttatacattttgtggcagaaatattgatatatttgattaatgtatgctactccagaatctactcagggaaaatgctagatagctttcatttatacctccagattcactgtccacctttctccatctagctatgtgtccaggagtctgatagtatagattgtaagtatgcagtctgtgtttacaggctctctgctatctgctttcccattagctctggccgatggaagtcactggcgagatattggagtgaggcagcagagtgagagaggtatttaattcacctagttctcttcatgagtggtcaccgtagtgtgtctctagactgaaggtctcagcatgtgaaaggtaccacccctcacaaggcctcttagtcttcagctttcagtaacagctcccttcctttacccattatgacccagaggtggtaatagtcactacagtgctagcttcaggttatcaagctatcctttgtggtttctctacaccttagcaaatagtgcctttattaaattttcctcaatttatcctaagttgaccatgtacctacttacttctcagaccctaaaagatgcatagtactgtttaatttatgaaatatttactaaattactgtctgaatacatacacatgcagaggcacaaacatacacacctgaaacacatcttgcttcaagggttttggatgaaggattgtagatctgtattctaattatattagcataggaattttactgtattttataaattattactgttcaaaaaattatattaatgttcagttaaacacagagcatgtaaatggcctacaggtaacaccaccaacatctcagttctaaaaatatgaaaaatgtcattgagctaccaatttaaataaatctcctaaagtgagtatagtatatggagcgcagtttcacaattataaacttgcctttgttacttaagaggaaaaaagcagcagcaagattagaccttaattccacttgatcacttgttcatcaacaaatggtcttctcacaaattccaagacgccttaagaagagatgcccagccggtagcattaacataactttatctaaattatttcgccttctctcagtgcttcaacaggaataaattcagcttctgaatttttgccagtgtatgacaatgtattttctagttagctgttgggtggtggaaagaatgtagaatttggagtcaaggaagctagtttgggtctcaacattgataccgttcttgagtcactgtgagcttgatttctgtagtccctgtctctaaaattggggtaaaaccacatacctgtcaggatcatgaggattaaacagagtaaatataaattatctagtatggagctcagctcatagtaagagcttgagtgtttctcaaacttgaatcagtttgtgaacatagccactcaatagaggaaggtttgttcctggggctgatccatgactgcagctgtgtgactgctgttgtggcatttggactgttcatggatggaccagaacctccagattctacatgtgataaccgtggctgagtaaaggctgttgtcagtatacatcacgcaacaacagaatgagtgtggggtagtatttgtgtaatttgccagagaagtgaggaactgaacagaatgagttttttcttgtttgtaaccacacatttagtttatgcttccattaattcataagtattatatttagcactgtaatatttaatattgatgttaccaaatgtgggtcaacatttaaagtctataaaaacatgcatacagtcttgatatttttaaaactcactatagtaagcttcacttttttctaatgaaattcactaaccagtttaagaaaatggtaaggttagtgtgaagaattccatgccataatactatagaattgctagagatgggccacatagttgattttgagcttctagtggcaaaaaaaaaaaaaaaaaaaaaaaaaggccaattataagatccctagagtcttagttgctttttggtaccaagatctgagagggcttcataaagtggcatacaagattgagaatttacacaagcagttttgaatagaataacagagactttagtaacaaatttaaacccaagcatagcaagcaaccttgttgaaccaaatagttctgtgagagttggcaaatcttaccgggatatagcttcaatagtgatgatggaatgataagaaataattgcctttttgttaaattttttatttgttaaaattagtaatcaactctctatggactgggagagctcaggaacaatatagctttaaaaagtttttcttcggcagtcaaaataaaatattacatttaaaattaattgaatctgtgaatatgattattaagataaaatgttatttccaaattaaattaaaagttttctttattttttactatcattcttctcctcaaattaatattccatctgagaagcctgaaaagagaagattaaaaggagtcattaataaaaggaagtgcatttaatgggaatatgattatcatgtagttcaaagaaaatttcattgtgcctcatactaattgctattttgtgcacctacttgccttgcttatcttaagatggttttggctttaggggaagtataaaaaattaaggtatacatatattatttaaagtagaccaaagttaaggcataaataaatagttaataattgaagcatgtgagtcagttaactttaaaactgtacttattaaagtctttgttacttttaagaagactatcctacgctttgagaaattgctgagtcatggtcatgatcacatctgtgttgtagttgtagcccccctgtatgggaactatgattcctgccttcaggctaaaaggcattaaaagaaaacaaaaacaaaaacagagagaccatgtagtgccatccccttctttcaagtgtgaactccagctcaatttccccctgctcatgtaaattatttagagctttcaaatagttgttttaaaatttttcttcagagtttgtagttgttatgtattgaacacaatggaagtgggcataatcttttctctgcctaaactctttaaagtttttgaaatgaagacatttaatttttttaacatttaacctgatataattttaactgtttctacctgagaagttatccagcaatgttcttttttttttttttttaaggttttttttttcccataagttataggggtacaggtggtatttggttacatgagtaagttctttagtggtgatttgtgagattttggtgcacccgtcacccgagcagcatatactgcaccatatttgtagtcttctatccctcgctcccatcccactctttcccccaagtacccagagtccattgcatcattcttatgcttttgtgtcctcatagcttagctcccacatatcagtgagaacatatgatgtttggttttccattcctgagttacttcacttagaaaaatagtctccagtctcattcaggtcactgcaaatgctgttaattcattcctttttatggctgcctagtgttccattatatatatatatattccatcatatacatatatgtttatatatattccatcatatatatgtgtgtgtacatatattccatcatatatatatattccatcatatatctattccatcatatatatctattccatcatatatatctattccatcatatatatattccatcatatatatatattccatcatatatgttccatcatatatatattttccatcatatatattccatcatatatatattccatcatatatatattttccatcatatatatattccatcatatatgtatattccatcatatatatatgttctatcatatatgttccatcatatatatatgttccatcatatatatctatgccatcatatatacacacacacacacacacacacacacacacacacacacacacaccacagtttctttagctacttgttgattgatgggcatttgatttggttccacggttttgcaattgcgaattgtgctgctataaacatacatgtttaagtatctttttcgaataatgacttattttcctctgggtaggtacccccccagtaatgggattgctggatcaaatggtagttctgcttttacttctctaagggatctccacagtgttttccatagcggctgtactagtttattttcccaccagcagtgtagaagtgttccctgttcactgcatccatgccagcatctactgttttgtgatttttttgattatgtccattcttgcaggagtgaggtgctatcgcattgtggttttgatttgcatttccctgatcattagtgatgttgagcattttttcatatgtttgttggccatttgtatatcttcttttgagaattgtctattcatgtccttagcccactttttgatgggattgtttgtttttttcttactgatttgagttcattggatattagactggatatcagtcctttgtcagatgtatagactgtaaagattttctcccaccctgagttgtctgtttactctgctgactgttccttttgctgtgcaaaagctctttagtttaattaagtcccagctatttatctttttttttattgcatttgcttttgggttcttggtcatgaaatcgtaagccaatgtctagacaggtttttccagtgttcttttctagaatgttaatagtttcaggtcttaggtttaagtcctcaattcatcttgagttgatttttgtataaggtgagagatgaggatccagtttcattctcctacaggtggctagccaattattccaccaccatttgttgaaaagggtgtcctttccccactttatgtttttgtttgctttcttgaagatcacttggctgtaagtatttgggtttatttctgggctctctattctgtttcattggtctatgtgcctgcatttgtaccagtaccacactgtttggtgactatggccttatagtatagtttgaaatcaggttgtgtgatgccttcagatttgttctttttgcttagtcttgctttggctatgcaggctcttttttggtttcataagaattttagaattgttttttttaattctgtgaagaatgatggtggtattttgatggggattgcactaaatttgtagattgcttttggcagtatggtcattttcacaatattgatttcacccatccatgagcatgggatgtgtttccatttgtttgtgtcgtctatgatttctttcagcagtgttttgtaggtttccttgtagaggtctttcgactccttggttaggtatattcctaagtattttatttttttgtttgcagctattgtaaaaggggttgagttcttgacttgattatctgcatggtcactgttggtgtatagaagagctactgatttgtgtacattaatctcgtatctggaaaatttgctgaattcttttatcagttctaagagctttctggaggagtccttagggttttcaaggtaaacaatcatattgtcataaaaaatgacagttttatttcctatttaccaatttggatgccttttattctttctcttgtctgactgctctggctaggacttccagtactatgttgaagaggagtggtgagagtgggcatccttgtgttgttccagttctgagagggaatgctttcaatttttccccattcggtattttgttggctgtgggtttgtcatagatggcttttattgcattaaggtatgtcccttgtatgccgatttcactgagagtttcaatcataaagcaatgttggattttgttgaatgctttttctgcatctattgaaatgatcatgtgatttttgtttttatttctgtttatgtggtgtgtcacatttattgacttgcatatgttaaaccattcctgcatccctggtatgaaacccacttgatcatggtggattacctttttgatatgttgttagattcggttagcaagtattttgttaaggattttagcatctaagttcatcaaggatattggtctgtagttttctttttttggttatgtcctttcctggttttggtattagggtgatgctggcttagtagaatgaattagggaggtttccttctttctatatcttgtggaatagtttcaaaaggattggtaccaattcttttttgaatgtctggtagaattctgctgtgaatccgtctggtcctgaacttttttttgttggtaatttttaaattaccatttcaatctcactgcttgttattggtctgttcagggtatctaattcctcctgacttaagctaggagggttgtatttttccaggaacttatctgtgtcctctaggttttctagtttatgtgtgtaaaggtgttcatagtagccttgaatgatctttcatatttcagtggtgtcagctgtaatatctcctgtttcatttcttagtgaggttatttggattttctctcttcttttcttggttaatcttgccttttatggcctatcatatggtctatcttggagaaagttccacgcgctgttgaatagaatgtgtattctgcggttgttggatgaaaatgttccctatatatctgttaagtccatttgttccaagatatagtttaaatccattgtttcttttttgactttctgtcttgatgacctgtctagtgctgtcagtggaatattgaagtcccccaatattattgtgttgctatctcatttcttaggtctattagtaattgtcttataaatttgggagccccagtgttaggtgcatatatgtttagaattgtgatattttcctgttggacaaggccttttactgttatataatgtccctctttgtctcttttaactactgttgctttaaagtttgttttgtctgatataagaatagctacccctgctcacttttggtgtccattttcatgaaatgcctttttccattcctttaagtttatgtcagttcttatgtgctatgtgagtctcctgaaggaagcagatagttggttggtgagttcttatccattctgcagttctgtatctcttaagtggagcatttaggccatttacattcaatgttagtattgaaatgtgaggtaccattgcattcatcatgatctttgttgcctgtgtactttggttttttgtttttttgtgtgtttgctttttaacttgtatttttgttttataggtcctgtgtgatttatgctttaaagaggctctgttttcacatgtttccaggatttgtttcaagatttagagcaacttttagcagttcttgtagtggtggcttggtaatggcaaattctctcagcatttgtttgtctgaaaagactgtgtcttttcttcatatatgatggttagtttccctggatacaaaattcttggctgataattgttttgtttgaggaggctgaagataagtccccaattgcttttagcctgtagggtttctgctgggaaatctgctgttaatctgataggtgtttctttataggttacctggtccttctgtctcatggctcttaagattctttccttcaccttaacattggataacctgatgacgaagtgcctaggcaaagatctttttgtgatgaatttcctgggtgttctttgtgcttcatgtgtttggatgtctaggtctctagcaaggccagagaagttttccttgattattcccccaaatatgttttccgagcttttagaattctcctcttcctcaggaacactgattatttttaggtttgattgtttaacataatcccagacttcttggaggctttgttcatattttattattcttttttctttgtctttgttagcttgggttaatttgaagacctagtcttcgagctctgaatttctttcttctacttgttcaattatattgctgagaccttccagagcatttcttattgttaaaagtgtgtccaaagtttcctgaatttttttttttctttaagctatctatttccttgaatatttctcccttcacttcttgtatcatattttggattttcttacattgggcttcgcctttctttggtccctccccaattagcttaataactaacctcctgaattatttttcgagtaaagcagggatttcttcttggatccattgctgatgaactagtgtgattttttgggtttgttgaagagccttgttttgtcatattaccagggttggttttctggtgccttctcatttgggtaggctctgtcagagggaaggtctagggccgaaggctgttgttcagattcttttttcccacagggtgttcccttgatgtagtactctcccccttttcctgtggatgtggcttcatgtgagccaaactgcagtgattgctctctcttctgggtctggccacccagagagtctgcctggctctgggctggtattggcacttgtctgcacagagtcctgtgataccaaccatctgtgggtctctcagccatggttaccagtgcctgttccggtggaggtggcggggtggggggtgcaatggactctgtgaggcttcttagcattgatggtttaatattctatttttgtgctggttggcttcctgccaggaggtggcactttccagagagcatcagctgtggtattatggggaggaaccagtggtgggtggggcctagaacaaccaagtttatataccctttgtcttccactaccagggtgggtaggaaaggaccatcagctgggagtggaactaggtgtgtctgagctcagactgtccttgggcgggtcttgctgcggctgctgttggggggtggaggtgagattcccaggtcaggggagttgtttacctaggaggattatggctgtctctgctgagtcatgcaggttgtcagggaagttgggggaaagggggcagtcacaggcctcacccaactcccatgcaaatgaaagggctggtctcactcccccagtgcacctcccaacaccctccagagcatttccaggctgagagcagtaagggcttgaaaacctgccccaggctgtatgcctcctagctttgaaagataagagcttggttcttcccctgcctgtggagtctgcacactgaatttgcaccctccttccagttctggccaggaggcttctcatctcgttcaaatggttacaaagttcagctagagatttccttctccctgtgtagttttaccctctgctcttctcccattggatccctggggtgccaggcaggaatggcctgctagggtacccagcgagctcccagggcctttctgctgcatcctctacccctgtattttgcttggctctccagattgactcagctccaggtaaagttggaaacttctcctgcaaacagaccttcggcttctccagtggggctgtgtgttcaggagaggagggtctccctctcccacttccgcaggtggggcactcgcagttttgggattgtctcctggttcctgcaggagcagtctgcttttttcagagggtctgtgggtcctctcaggatggctggtttgttttgcagtcgatctgatgctaaaattcacagtgcgaggtgccgcccactgctctgtccagagctgcaatctagtcctgcctcctgtctaccatgattgaccttaaaaactatccagcagtgttctgataacaatttgaattcatttacatgctgtcaacattattgctttaggatatattttgtttagctgccaagccacaacagtaacttctttattctttgcatcctttgctgagaataaaacctgttttgttataaatttacttatcttggggtatgaatgggctttggaatgagagagtcttgagtctaatcccactctgccatgtaaacttaaaattgttcccagcttaagttttctcatttgtaaaacagggtaacaagccttacattattgtggtattttgaaatcaagcatgttggggggctgacacaagtgctttgcaaacaataaatgccctgtgaaggataggtattaccccctgcagaaaaatgaaactggatccctatctctcattatatacaaaaaccaactcaagacagattaaagacttaaatgtaagacctgaaatgataaaaatactagaagaaaacctagggaaaactcctgtggacattgctgtaggcaaggaactcatgactaagacctcaaaggcagaagcaacaaaaacaaaaatagacaaatgagctttaagtaaactaaaaaggttttccacagcaaaagaagtgatcaccataatgaacagacaaccacagaatgagagaaagtatttgcaaactacgcatcccacaggagactaatatccagaatttataaggaagtcaacttaacaataacaaaaactaaccctattaaaaggtgggcaaaggacatgaatagacatttttcaaaagcagacatacaaatggacaacaagcatacaaaaaatattcaactcactaatcataagagaaatgcaaattaaaaccacaatgagatatcatcttataccagtcagaatggctattgttaaaagtaaaacaaacaaaacaaaacagatgttggtgaggatgcagagaaaggggaatgcttatacactattggtaggaatgtaaatgagtgcaacctctatggaaatcagtatggggatttcttaaagaactaaaattagaaccatcattcaatctagcaatcccactatggtgtatctactcaaaggaaaataaatcattatatcaaaaagatacctgcatttttatacttatcacagcacaatattcacaatagcaaagatatagaatcaacctaagtgtccattaacatatgatttaataaagaaaaggtagtatctatacacaatggaatactattcagctataaaaaagaatgaaataatctcttttgtagcgacatggatagaactagaggccattgtcttaagctaaacaactcagacacagaaagacaaataccttgtgtccttacttataagtgagacctaaataatgtgtatatatggacgtagaatttagaatgatatgcaatggacactaggaagtgtgaggggatgggaggagggtggatgactgggagttacttaatgggtacattatttgggtgatggataccctaaaaaccctgatttcaccactatgcatgcagtccatgtatataataaaattgcacttatacctcatacatttatacaaatttttaaaaaggcaaatataagcccattttcttttaaaaaaagtaaaataaaaggtggatattattgttagatgcgattattgttagatgctactttctgacttattcccagttcttagattgggggaactcgatttttgactctacagttcacagttcaacctttggatttctgaaaaaaaaaaaaaaaaaaaaaaaaaaaaagaattgagaagcattttgtagaacagattggagtttatctttaaataatcaaattaagcctttgtaatgggaacaagactaaattcagctctctaaattagccacaggaaagaaacaagaaggacaagtgatattattttaggtgctcagatatttgtataggctttgcttgctcacataaggaattgaggagagtatatcagcactgagctggtgctgtagtcccagctactggggagactgaggtaggaagatcactggagtccagaagttctgggctgtagtgtgctatcccttttgggtgtccacactgtttggcatcaatatactgacctcccaggagtgggggactactagtttgcctaatgaggggtgaagcagcccaggtctgaaatagaagaggtcaaaactcccatgctgatctgtatatcagcaatgtatacagtcttgaggaatcacacaggacagaaagtacctgaatcttaatctcagatatgtctaaaagggattgttaattttctgctgtgtgtcaggccctatctagtcatggtgtgaaagacaaagatgaagaaggcaaggctcttatgcaattgatggatagctccaggaaagacatcctggtgagcaggactgtgtgaaatagggaagcagctcctctaaattctttttttttttttttttttgagacggagtctcaccctgttgcccaggctggagtgcagtggtgcaatctcggctcactgcaacctctgcctcccgggttcaaatgattctcctgcctcagcctcccaagtagctgggattacagacgcccgccaccatgcccagccaatttttgtatttttagtagagacagggttttactatgttggccaggctggtctcgaccttgtgatctgcctgcctcagcctcccaaagtgctgggagtacaggcgtgagccaccgcgcctggcctctacattcttcatattgggactgtattagttagggttctccagagaaacagagctaacaggatgtatatatagaaagaggcttattgatggctcacatgattgtggaagcttgacaaatccaaaatcttcagggtgggccagcaggctggagacctgagaaagagttgcagttttagtccgaaggtgatccgttggcagaattccctctgcctcaggggcggtgagtcattttctgttaagacctttaattgattggatgaggctcacccatattatggagggtaagctgttttactccaagtcaactgatttaatatcaatcacatctaaaaaacactttcacagaaacatactatttgatcaaatatctgagtacagtggtctaggcaagttgacacataaaactatcacaggaacttgtttttggaatctgccttgtaccccatagcagattcaatcttatatagtatcccagccctaggccttaagcctccatcacttagttccatcctttgtttatgactgtgcttcaagcctactttgattgatggcactgctaagaccgtgtgcctttctgatcataccattagcttcagtcttgtcaacatttttatctgttgcagactgctgcctgggcctggcctcttcctataaccctaagctccactttgatcccagcctacttcagtcttctgcacagttgatttggcctacagactgctgaactgaggcaggatactcatagctcttagggggccattagtgtcctgacaatgtcatatcttccccttagctttgtatactatctagaagttacgtggcttcctgggattcttattacaaacttcagatccttcttgtttagaggtcatttattgtgaggctgctcctgccctctttgttctctcatcatgttttgtagggaggagaaattattaaatatactgccattttttaaataattgaatgcatatggtatttatgacctgcataccagtactgttatttcgctccattatgacttttattctcagaggcctatggttttcaaatgccactgttgtgaatagctgtctgtagaattgctaccatggtgcttgaatccttatacactagccattctacctgataccgtattccagtgagcactgtgcttgctgcccagcatttcagattggatctgatttcctgggattaaattccagacgttattttccaatttgtcatctgcctgtttgggggaagtttctttcaggttgtaggtcagatgggtgttcactgacatctttagatcctatttattgggtcttcttgttggtatttttttctataatggcagaataatttgttttcctcttcagaataattgcaaggtgaaaacaaataattctagcttaaaaatgatatcaaatgacttcattggttatattttagtagcttggaatattacagaaaagaagtacatattttcttctgctttgaaaggggaaatttaaatcaggatacttttagtctgtaaacatgactactttttaaaaacatatatgagaaatattggaacaataaaatctgattcatctaatagctttccttgatactttttatttttaactatgatagatatgtattaacatgtagttattctctttgaaaaagtatattcattttctaaaatgtacttagcttttcaaatatgattctcacagtgtcctgtgtattgttaaaaataattactgaaacagtttcactttgaagtacagtacttgaaatcttcagatcaatatcgccttttaaacctttaatacaaccttatgccaatcaagtcgcaagtgtagtttgctaaggtagaaacttcttgatttcagtacaattataactgaccaatctatatttcaaaatagaggcttttataatgagattccatatggatattgatttcaattttctgtgttaatataaaagtgcaagtggtctcaagcttaggtgatccaaaatatttttttaaggtagttgtttgaaacttagaatgttttttctaaagaactagtgttatacatgacaggtttccaggcccacccacaaaaggctgctcaaaccatagtgtaagctgaaaatagtgtcctaatggtggctgtaacttcttacttccctgaaaccactctaagtcctgattttctttgtgttcctagtatttgagtgtgagagggaagttggtagaagcaggtaggttgtatctggttagggtaaaagtgagaaaaagggttgttgatcagttcaggtggggtttaggtatagaagcttcatgaattagtgagttgctaaatatcagggaatgtaaagggcaaagttttggcctctggggtctagcaatagcaggaatggtgcccctgtctttagcagaggacctcagtgtttccatagggtctgtgatggcgcagtaagggtgtggcccttagcagaggtattggcactggtagctgtttgtatacataggattttcgcaactgtttataaggattgaatgctggtgagaggtgacagcatgctggcagtcctcacagccttcgctcgctctcggcgcctcctctgcctgggctcccactttggcggcacttgaggagcacttcagcccaccgctgcactgtgtgagcccctttctgggctggccaagactggagccggctccctcagcttgcagggagatgtgtagggaggcgcgagcgggaaccggggctgcgcgcggcgcttgcgggccagctggagttccgggtgggcgtgggcttggcgggccgcgcactcggagcagccggccggccctgccagcccgggcaatgaggggcttagcacccgggccagcggctgcggagggtgtactgggtcccccagcagtgccagcccaccggcgctgtgctcgatttctcgccgggccttagctgccttcccgcggggcagggctcgggacctgcagcccgccatgcctgagcctcccacccactccgtgggctcctgtgcggccaagcctccccgatgagcgccgccccctgctccacggcgcccagtcccatcgaccacccaagggctgaggagtgcgggcgcacagcgcgggactggcaggcatctccacctgcagccccagtgcaggatccactgggcgaagccagctgggctcctgagtctggtgaggacgtggagaacctttatgtctagctcagggattgtaaatacaccaattggcactctgtatctagctcaaggtttgtaaacacaccaatcagcaccctgtgtctagctcagggtttgtgaatgcaccaatctatactctgtatctagctactctggtggggccttggagaacctttgtgtctagctcagggattgtaaaggcaccaatcagcgccctgtggaagcagaccacttggctctaccaatcagcaggatgtgggtggggccagataagagaataaaagcaggctgccggagccagcagtggcaacaggctcgggtcccctttcacatggtggaagctttgttcttttgctctttgcaataaatcttggtactgttctctctttgggtccacgctacctttatgagatgtaacactcaccacaaaggtctgcagcttcactcctgaagccagcgagaccacgcacccaccgggaggaacgaacaactccagatgcgccgccttaagagctgtaacactcgccgccaaggtctgcagcttcactcctgagccagcgagaccatgcacccaccagaaggaagaaactccgaacgcatctgaacatcagaaggaacaaactccggacacgctgcctttaagaactgtaacaccgcgagggtccgcggcttcattcttgaagtcagtgagaccaaggacccaccaattccggatacactgggatttagatgccaactttactttttttagggtctgctgggctgagcctttaaaatttccctttgcttttagaaattaatttatggaccatacttgtatttgacccattatcccaagaaaattcttaaagcaaacataaaatacatggtccaggatttaatctagttgtcatatcattttaggttttcttaatctgtaacagctgttcagtctctctttgtctttcatgacaataccattttaaaaaattaatagactttatttttaagagcaattttaggtttacagtacaattgggcaagataatagtattatgtcaatgtaaattttctgattttgatagttatacatggttctgtaaaaaactggcttgtttttaagaaataaactgaagtgcttagggaaaagagcatcattctgcaatttactcttaaaaactatatatatagttttttctatgtatatatatagagagagagagagagagagagtgtgtgtgtgcgtgtgtagacaataaagcaagtgaagtaaaatgttaacaattagggaatctggaagtctgtgttctatatatctttatatccaataattttacttaaaataatgttttaaggaaatggtcataaatatttttctttttttttttttttttgagatggagtctctctctgtcacccaggctggagtgcagtggcgtgatctcggctcactgcaagctccatctcccgggttcacgccattctcctgcctcagcctcccgagtagctgggactacgggcatgtgccaccatgcccagctaatttttgtattttagtatagtcttaactgtaatagcaaaaggttagaaaagacctaaatggctatcaatgaagaattgcttacataagttagatttttacttaatggaatattatgtatgtatccatgaaaatgatgtaaaaacgtatagtccttgatttaggaagatgtctgaaatattttcttaaataaaaattgtcacagaaaaaaagacattaatttcggccagctgaggtggctcatgcctgtaatcccagcactttcagaggccaacgggtggtttacttgaggccaggagttcgagtttagcctgggcaacatggcgaaaccccatctctactaaaaataacaaaaattagctgggtgtggtggcacacgcccataatcccagctactcaggaggttgaggcacaagaattgcttgaacctgggaggcagcagaggttgcagtgagccaggatcatgccacagcacaccagactctgtctcaaaaaaaaaaaaaagaaaagaaaaaagacattaaatgcaaagaacagtgtcagtattgctaggatgtctgttctttccaactatatgttcaacatatcccaaaagtaagttgcaaaactataaaactttaggagataacataggacaaaatataggtgatcgtagtttgctgatgagcttcttttagatacaacaccaaaaacactgtacatgagagaagaaattggcaagtgagacttcattacataaaaaatttctgctttgtgaaagacactgttaagagaacgaaaagacaagccacaggctgggagaaaactttgtaaatatatatccatctgataaaagactggtatctaaaatatacaaataattcttaaaacccaacaataagaaaacaactcaagtaaaaagtaagggaaagatttgaacagatacttcactaaataagatgtacagatggcaaataagcacatgaaaagatgctcagtattatatgtcattaaagaattgcaagttaaaataacaattagctatcataatagctaaacccaaaactctgataacattgaatgctgacaaggacgtggaacaacagtaactctcattcattgctggtgggaatgcaaaatggtacagctgctttggaagacaggttggtaggttcttacaaagctaaacttagtcttactgtatgatccagcacacatgcttctagtatttaccctgagttgaagactgtccacacaaaaacttttacatgaatatttttagctactttatcataattggaccaaagtagaagcaaccaagatgtccttcagtggaaaaatgcatagacaaactatggtacacagatataatggaatacagatataatgcggagacactgcagttttggtttcagaccaccacaataaattgagtatagcaataaagtgagtcacagaaattgtttgctttcctaatgcaaataaaattatgtttatactatactttagtctattatttgatagcattatatctaaaaacatgtacataccttaatttaaaaatacttaattgctaaatattgctaatgatcatctgagtcttcagtgagttacagtctttttgctgatagagggtcttggctcattgttgatcagggtgatggttgctgaaggttagggtggctgtggcaatttcttgaagtaagacaacagggaagtttggtgtggttaacttatcctttcaatttctctgtagcacgggatgctgtttgatagcattgtacacacagtagaatttctttcaaaattgggttcagtcctctcaaacagtaccgctgctttatcaactaaatttgtgggatattctaatcctttgtagtcatttcaacagtctacatagcattttcaaaaggagtagtttccatctcaagaaaccactttctttgctcatccttaagaagtaactcctcatctgttcaagttttgttgtgagactgcagcaatttagttatgtctttagggttcacttctaattctagttctcttgctatttttaccacatctgcagtgatttccttcactgaagtcttgaagccctcaaattcatccaccaggcttggaatcaacttcttccaaactctcattcatgtttatatatatatatatatatatataacacaggctgggcctatatatatatatatatatatatatatatatgggcccagcctatgttataatttgacctccttttacaaatcatgaatgttcttaatggcatctagaatggtgaatccttttaagaaggtttagaattactatctgtggcagttatagccctattaaatgtatttcttacaagaaggcttgaaagttgaaattagtccttgatccatggactactgaagggatgttgtgttagcaggtgtgaaaaaaacattcatcttgtagatcagagcttttgggtggccaggagcattgtcaatgagcagtaatattttgaaaggaatcttttttttttttctgagcagtaagtctcaatagtaatcttaaaatattcagtagaccatgttgtaaacaaatgtgctgtcatccaagctttgttgttccatttatagagcacaggcagagtgcatttagcatcattctttttttttcttttttttttaaattatactttaagttttagggtacatgtgcacaatgtgcaggttagttacatatgtatacatgtgccatgttggtgtgctgcacccattaactcgtcatttaacattaggtatatctcctaatgctatccctccccactgcccccaccccaaaacaggccccagagtgtgatgttccccttcctgtgtccatgtgttctcattgttcaattcccacctatgagtgagaatgtgcggtgtttggtttttttgtccttgcgatagtttgctgagaatgatggtttccagcttcatccatgtccccacaaaggacatgaactcatccttttttatggctgcatagtattccatggtgtatatgtgccacattttcttaatccagtctatcattgttggacatttgggttggttccaagtctttgctattgtgagtagtgccgcaataaacatacgtgtgcatgtgtctttatagcagcatgatttataatcctttgggtatatacccagtaatgggatggctgggttaaatggtctttctagttctagatccctgaggaatcgccacactgacttccacaatggttgaactagtttacagtcccatcaacagtgtaaaagtgttcctgtttctccacatcctctccagcccctgttgtttcctgactttttaatgattgccattctaactggtgtgagatggtatctcattgtggttttgatttgcatttctctgatggccagtgatgatgagcattttttcatgtgtcttttggctgcataaatgtcttcctttgagaagtgtctgttcatgtccttctcccacttgttgatggggttgtttgttttttttcttgtaaatttgtttgagttcattgtagattctggatgttagccctttgtcagatgagtagattgcaaaaattttctcccattctataggttgcctgttcactctgatggtagtttcttttgctgtgcagaagctcttgaatttaattagatcccatttgtcaattttggcttttgttgccattgcttttggtgttttagacatgaagtccttgcccagcctattcttaatggccctacgatatttagaatgttaaacaagcattggcctcaaactaaagttacaagctgctgtagctcttaacaagagagttagcctgtcttttgactcttcgaagctaagtattgacttctcccctctggctatgaaaatcccagatagtgtcatcttccaaaataaggctgttttgcctacacaggaaatctcttgtttagtatagccaccttcatcagttatcttagctagatctagataacttgctgaaccttctacatcagcacttgctacttcatctttcacttttatgttatggagatggcttctttccttaaacctcaggaacctacctccgctagctcccagcttttcttctgcagcttcctcacctctgtcagccttcatagaattgaagagacttcgggctttgttctggattaggctttggtttaagggaatattgtggttggtttgatgttctatccagattgctcaaattttctccacatcagcaatagggctgttgcactttcttatcaaatgtgtgttcactgaagtggcactttcagtttccttcaagaaattttcctttgcatttacaattcagccaactgtttggcacatgaggcctagctttcagcttgtcttggcttttgacgtgtcctcctcactaagcttaatcatttctagcttttgatcgaaagtgagacacatgtgactctttctttcagttgaacacttagaggccattgtaggtttattaattggcctaattccaatcttgttgtgtctcagggaatagggaggctggaggagagggagagatatggataatggctggtcagtggagcagtcagagcacacacatttatagattaagttcattgtcttatatgggtgtggttcatggtgccccaagacaattacagttataacatcaaagatcactgatcacagatcaccataagagataaaataataatggaaatgtctgaaatgtaagaatcaccaaaacctgacacagagacactaagtgagcacatccgcttgggaaaatggtaccgatagatgtgcttgatgcagcgttgccacagaccttcaatttgtaaaacattcaatatctgtgaagcacaataagtaaagcataataaaatgaggtatgcctgacttatttagtgatataaagaaatgagctggccgggcgcggtggctcacgcctgtaatcccagcactttgggaggccaaggtgggaggatcacgaggtcaggagattgagactgtcctggctaacatggtgaaaccccgtctctactaaaaaaaaaaaaaattagccaggtggggtgtggtggcgggtgcctgtagtcccagctactcgggaggctgaggcaggagaatggcctgaacccgggaggcagagcttgcagtgagccgagattgtgccactgcactcccgcctgggcgacagagcgagactccgtctcacaaaaaaaaaaaaaaagaaaagaaaagaaaagaaatgaactaacaagtcatgaaaagacatggaggtaccttaaatgcctattactaagtgaaagatagccagtcttaaaagcctttatatactgcctgatgccaactatatgacattatggaaaaggcaaaactatagagacaataaaaagatcagtggttgataggagttgagtaggaggagtgaataggttgagcatatggcagttttagggccgtgaaactattctgtatgatactctaaaggtaaatatatgatattacggatttgcaaaacccgcagagctgtacaagaatgaaccctcatgtaatctctggactttaataaataataatgtatcaatattggtaaatcagttgtaacaaatgtaccacagtgatgcaagatgttaataatagggccaactttggacaggggagagagggtatatggggactctgtactttatgaccaatttttgtcaaaacttaaaactgcactactaaaaataaaagcaataataaaactcactaaaaatgcatcaatttaaaaaaagttaaaaaaccatgtattctattgattgttcatatatccttttccataattctccagtgacttaatatttgaatttaaacaatttaaaaatgatattcatataattccaaggttttccacacattttttatggactctcaattgttcttgggtgtaccttagttattcttagttcatctgttattttcctgtaagtacatatttcctgaaggtatatggttatactttgaaacaaaattagaaatgatcttacattaaatattatcctatttaaactattttaatagttttagatgatttaagttctcagcatgctttttctatcttctgtgctatatatgctctatttttatatcctttgtttctttgcagatgaaatggtttctattgttctagttctttctgtcttttgccaatagcccacctcatatctctgtacatgcacacccatcacaaacagacagacacacacatgcatacagacttttgaaccttagagttaagctgcattcttgtcaaaaagatctagcactccaagagtggatgcctctccctttctttgggagatcagcattactcatcacctcaaatattcttgcttcactatttgctcattgttttggatatacagagcacttaaatatttgctattttagtgcatcattaatgaaccgtttattatgttttcaaagtcaaatatgggtcaaagtaatttttttaactaagttttactcttcaggttcttttttaatgtgaaaaaaagaggcccacactgtttctgtctatttataggtggtaattggaagttggtacaagagtagtctaaacagaggagtcatattgctccaggcagattaaaaaaggtatctagttatataagcctacataaagccacatctccagactaatattttcaaacgtgaaggggataaaatttatattatgaacagctgtagatttaactttgtaaagcctaaaattatagtagaaaatatttcaattatagttcttaaaatatgaaagagatgttgattgtacattgaaatattttgcataatgacatctatttttcacacacatgcatacatacacacacattcccattttgtagattataaaacagaggcacacagtagttaagaggcttgtataagcttacacagctagcagggagaccatgattcaaacatcaggcagtagaactcctgagtaccctctctgaactgctaagctatgttacctctcatcttaactaacatgactcattttttgcccttaaaatgccttgaaaaatactatgaagaaatacctcatccagctgtagaggaacaaccaactacatttatttttagaaatgataaaggaattgttttgctctgtacatagacttctacaactagagcagttgcataacgtggtctgtgtagattacacttttttcacgattcatttaactacttgaatttgatatcatttcctttcaaactgaagcacatctgatgcagatttactgggacattcgcactccattttggttttaaaagttgcagacctcatttacaagagcatgaacaacatagctatttgaaattatcccatcttttataaggtttcacttttcttctggaaaggcaaataatacgtggaaaaacatacttaatagtattactgtttttttaattataactgacatactgctcatggactagttgccagttaacccactgatgtgtaaatgtcctaaactgagaggcttgactgaagaaaaataaccaagttacttagcctatatgacgaagtttcctaaaaacccctccatacacatttggaaatattcatattatatgtttttttaaatctctaaatgggaaattcatgtgtatttttgaaatcaaatccagactgctttgatttgcttgtgcttacgtcctataatttcaatgtcaagatgcaaaattgtactagtcattccttggagtggttaaaaatgaaacagtagtttgatttcatattcatgatcgattaagtgagaaatcaactgtgcagtagaacttttccagtttatgtaattcttgaagctttatgagctttagaatcaaaacgctttcatgatctttgcttaagacattatagtagtgttgcttagaagacaaagcaaataaaaatacttttatactcttcgcttaataccttgtagtagtcttgcttacttaaaaaaaaagcaaaaaaaactacatctgccaccttgcatttaatatttagaaaatacgaaaatgaaagaatcaaattaacaaacatttatttactcaacataaataattaacatttttggttttttgcttaatatattttattaaaaatttgacgtcaaagataaggttgaagtccactctgttacttctttagttccagcaaccgccctctcttttcagaggctactgcatttatgaatttggtgtatattcatttagttcatacttttgtccattgcctctactagtttaatgctttaaattcaatctgccttcttgtatcaaccatcatgtttagcattttagatacaccatattttaaactatttccaatcaaaatgtcagttattaaaaaaatcagtgtttattataaatttctatgataaatatttttcttggatctaattccttctttattgccaaaatttgtttttaatgagtgtaacaaactgttaatttttgtatgtctgaaaatttctttattttatccttactcttcaataacttagattcaagtatagaatcctgggtatagaattcctgctggatggttagtcttcttcaataattagaagataatatttcataatctagtagcatttgttgttgctgatgagaagtgttagtataattgctacctctataacaagctctcatatctctctgatagctttaaatattttctttttgtctttgttgttatggaatttcattacaattatgaatacctgtcgatttatgtgtgtatatataaatacaatctcccatttcttcaatctgatgattcttttttttgttagagaatatcagccacatactttgtatatattatcatctctgcacattctctttttttcctcacttagtgggactcctatgagacaaatgattcatcttttcattcttatacctcaaatcaatttctctttcatagtttttatcttttttctttccatattgtgtatctgcctcatatatctctttagctaagtctaatttatagttctattaattctttatttatttattttattattattattatactttaagttttagggtacatgtgcacagtgtgcaggttagttacatatgtatacatgtgccatgctggtgtgctgcacccattaacttgtcatttagcattaggtatatctcctaatgctatccctctcccctcccccccaccccaaaacaggccccagagtgtgatgttcccctttctgtgtccatgtgttctcattgttcaattcccacctatgagtgagaacgtgcggtgtttggtttttttgtccttgcgataatttgctgagaatgatggtttccagcttcatccatgtccccacaaaggacatgaactcatccttttttatggctgcatagtattccatggtgtatatgtgccacattttcttaatccagtctatcattgttggacctttgggttggttccaagtctttgctattgtgaatagtgccacaataaacatacgtgtgcatgtgtctttatagcagcatgatttataatcctttgtgtatatacccagtaatgggatggctgggtcaaatggtctttctagttctagatccctgaggaattgccacactgacttccacaatggttgaactagtttacagtcccaccaacagtgcaaaagtattcctatttcaaaagctaatccaccacgatcttgtaggctgtatccctgggatgcaaagttcatttaacaaatgcaaatcaataaatgttatttattacataaacagaactcaaaagaaaaaaacacatgattatattattatcttaattaatgtagaaaaaccttttaatgaaattcaacatccattcaggttagaaatactcaacacaccaggcgttgaaggaacataattcaaaataataagaactatgtatgaaaaacccacaaacaacattttactaatgagcaaaagctgcaagcatcccccttgaaaattggaacaagacaaggatgcccattctcaccactcctattcaacatagtattggaagtcctggccagaacagtcaggcaagagaaagatataaaaggcatccacattggaagagaggatgtcaaactattcctttttgcagacaatatcattctattcctggaaaatcccacagtctctacccaaaagctccttgagctgataaacgacttcagcaatcaggatacaaaatcagtgtacaaaaatcagcagccttctgaccaggcccagtggctcatgcctgtaatcccagcactttgggaggccgaggcgggcggatcattaggtcaggagttcaagaccagcctggccaatatggtaaaacctcgtctctaataaaaatacaaaaattagccagacacagtggcatgaacctgtagtcccagctacttgagaggctgaggcaggagaatcgcttgaacctgggaggcagaggttgcagtgagccaagattgcgccactgcactccagcctgggcgacagagtgagactccgtctcaaaaaaaaaaaaaaaaaaaaaaaaaaaatcagcagccttcctatacaccagcaacatccaagttgggaccccaatgaagaatacaatctcattctcaataggcaaaagagaataaagtacttaggaatacagttaactatagaggttaaaggtctctacagtgagaattacaaaacactgctgaaagaaatcagagataacagaaacaaatggaaaaacatttcatactcatggataggaagaatcaatattgttaacatggctgtactgcccaaagcaatttacagattcaatgctattaatatcaagttaccaatgacattcttcaacgaattagagaaactgttttaaaattcatatggaacaacaacaaaaagcttcaataaccaaggcaatcctaagcaaaaagaaatgctggagacattttctacctatctttaaactattctacaaggctggagtaactgaaacggcatgatactgtcacagacacacagacaaatggagcagaatagagagacctgaaataatgccatatacctacaaccatctgatcatcaaaaatgttgacaaaaacaaccaatggagaaaggactcattcaataaatggtggatatgcactagaccccttccttacaccatatacaaaaatcaactcaagatggattaaagtcttaaatgtaaaacctgaaactataaaaaccatggaaggtaatctaggaaataccattctggacacaggccctaaagatttcatgacgtagatgccaaaagcggttgcaataaaaacaaaaattgacaaatgggacctaattaaactaaagagcttctgcagagcaaaagaaactattagcacagtaaagagactacctacagaatgggagaaaatatttgtaagctgcacatctgacaaggctcttatatccggaatctataaagaacttaaacaaattaacaagcaaatgaaccccaaacaacttcatgaaaaagtgggcaatggacgtgaataaatacttttctaaagaagacttacatgtggttaagaagaacatgaaaaaatgctcaacatcacgaatcattagagaaacaataatcaacaaccacaatgagataccatcttataccagtcagaatggctgtcattaaaaagtcaaaaaaataacacatgctggcaaggttgtagagtaaagggaatgcttatacgctactggtgggaatgtaaattagttcagccattgtgaaaagcagtttaatgatttccaaaataacttaaaacagaactatgattcaactcagcaattccattattgggtatatactgaaaaggaaaataaatcattatgcaaaaaagaaaatgcacttgtatgtttatttcagtactctccataattgcaaagacatggaattaacataaatgcccatcagtggtagactggatacagaaaacatggtacatatacactatggaatactatacagccccccaaaatggatgagatcatgtcctttgcagcaatatggatggagctggagttcagtatcctaagcaaagtaacataggaacagaagaccaaatactgcgtgttctcacttataagtgggagctaaacactgaatagacatggacacaaagaaaagaacaaaagatacccaggcctacttgagggcagaaggagggaggacatgaggatcaaaagctacttaagaggtactatgcctattacctgggtgactgaataatcagtacactaaatgctcatgacatgcaacttacctatatgataaacctgcacatgtatccagaacctaaaataaaagttttggctgggcgtggcggctcttgcctgtaatctcagcactttgggaggccgaggtgggtggatcatgaggtcaggaattcaagatcagcctgaccaacatggtgaaaccccctctctactaaaaatacaaaaaatagctgggtgtggtggcacgtgcctgtaatcccagctattcaggagaatcacctgaacccgggaggcggaggttgcagtgagccgagattgcatcactgcacttcagcctgggtgacagagtgagactccgtctcaaaaaaaaaaagtttttaagaaataaatacaaaagaacacgaagaagtatttgctaacgcatatttttcttttggagcttagtatattaataggtatgtgatgcatattaactagcataatctgagatatttataaaggaaaatatcatcttgctaagtggttatatctcagccaaaaataaatttacatttgttataaaaactgaaaatttatgtggtttatgtgtagaaggcttatagaatcagtatgattttcattcagattggtgtgtgattttttttatcagtagaaaattttatgataacaacatgaaccactgctgggaattcaatggaccgtaaacataggcacataacagacatggaaacacgtacattgtgaaggataagtagatatttatcaaattatatatatatgatacatatacatataagcatatatgtatatatatgtaaaacattgtaaccatggccaccacctttagtaaaggtacatggtgatatgagtgcttataatagggaattaccttgtcagggaagttaaggaaggctttcctgaacaactgatgcttgaactccaacctgtgggatgatgtgttagaactggctagtgagtgggaatatccttacaaggaggggccctgtagcagaaggaaaagcagatgaaaatattgtcttcatacttagaatttaattttaaattttactgatgtttgtgttaatatccttgtctaatactattcttttacataagctttaatggagaccacccaattggttccttcagaaaatgtatgttaattaatgctagggacctatagtagatgtcataaaccttatgattaaacattacaactgtgtaaaattacatcttagtaacctcagtcatttgtattatattaaaatgagaaaatgcacagtgatagaagtcagattaaaggtcatgtaactaaaattgtatgctgaatgttgaggaaagaaaatttggatgttctctgttcatttgggttattcaaaataacatgtagtcctgcatacatttaaaaaattaaattagacaatttatcagttgtctaatttaaaatgtttggattcatcttcctatctgataacaattttttgtttttatattcagtactttgaaaaatcacagacttcacgttaacacttaagcattctaaaaaggcacaaaagcatgtgaatatagaatttaagttttgaggattgttcttgtcatttcctgcacacacagtatttgaaaaatgcatatgaccttgcatttaggtaatattagatcagaatgatctttccacatagaatattcatatgccagcagaagtatacatatctactttagagatagtaaacataggtcaaatagtgactgtggaccacatatattcacagcataaagaaattctcacattgaggaaattttatttatttgaatttttaaattgttccattggatgacagataacatttaggtgttaattacccaattattttcctttaaaagtaataaatgtatgtaatttctgtgaaaaggaaaaccagaaaacaggcatctgtttattctcatgtactgctaacttaaattttatgtaatttcaaagtccaaagccaaattatacaccttttctattgcaagcaaataaaaacaatgtaaaaattactttaaattcaagaaacacgagcttatacagttttcattatgatcacatccctaatgttcagagcctttcagaaaaaaggattttcatccattattctaaactattttattaatttgttaaattaaacagatactatcacgtaaaagtaacctcttcccatcttgttttcactaattactttcaccaagatcataataccttcttaaactgaagaaactattcatgtccccaaatacagtgcattggccttcacacacagttattgtatgttttggctcatcatgggccctctttggagatatgcttgaggactcccctttacctctaatgtctacagattcagcttttcagttcattgtgttaactgagttttacatacagactataaactgtctgctgaatctattgagataaaatttgtcagcttttgtgctcttttgcatagggtgaatactaatcttcatattcttatacatttagtttgaaacaaagtgaaattaactggtagtttaatacttcattgccttatgcctttttagctgaccatttgactgtttctctccagtcttgctttttcatctacaagtttactacaaagactctacaaatggttaatttgattgaaaatatctgcctaaactatgtcagtaaagcatttttccccttttttggctagatgccattattccatatatataattatttcattattttctcttctttatatcagattaagattcatgatacacattcttgtattgcctgtacggaaaacacagctccgttattcactttggctaagagccccttgggatttctgacattgggtaaattatagatatagtagacaaactgttaactcaggagtagtgaagaacttaactctttaatgggtagcttatcccaattcaccgctttcatgggaaaccaaggctgttttgaacaacatatgatagaaagtggcaagacatattctgtcatttgacacctgacaatatattatatatctcttttccttagtgtacatgttaggaaaattagcaagcatttataagctcatggaaactctgaaattccatataagttgttttatcaagtcgtagcagtcagttctatcacagcatatgctagacagggccagggcaaaaactacatctacctagacatgttgctggctacacatcttattgaagaccaaattagacagtaaggaggtggtgagtccttactggaacatctaaagataatcatcaaagacatgtactgaatattgttatgtctaggcttctttctaagtgcattttaggtgccagctcatttacttttcacagttctttgaaatactgatattgtctccattttgtagctggggaaactgagtcagagagaaaggttaggaagcattgctcaaggtaacatagaagaatgacagagctaggatttgattgcagatattctggcccatggcacctcttaacctttgtgttatgttgcttctcaggctgacagtgagctcagacgctggaatgttggtcaaaatgaggggacttgaaagtgaacttcaaaattatccagttattttctggggtgatgctaaaaaaaaaaacccatattcagtagtgagcaaaagaggtgtcatgaagaatgtttatttagtggtcagtatgtagatggccaactctagaaggaggtgtgacattgtggtgtccaggctgcatgttatgaatagatttggaacctggcatgaagatccatagcagcccatgggtggatctatacagaacaaaggccctaacccaagaactagtatgtcctttttctggcctccttttaaaacaacttcttggtatgggtatataatgtgggcagaggtgttctgttctctaaagcaggtacaaatgatggccgctgagcgctggagcctccagggccatcacatttttaacagataaattacttaaagcttgaataaatggaatcttgtccatgctgtgatattacttggctctttgtgggtcctcagtaaacatgaaataaccctgaccttttaggaaaagattaatctggttactagccgtaagtgttaatgtaatattcttgtagcaaataaaaccctaagcacacagttgttgtttggtaaacattttgtttattgagcctgattttcctgctttcagccatagagaaatttaagcttcatatattattctttcatgggtaaattgtacctgctttttgagggtgagtagactgaaactaagactacggaagctaacagtttcatatgcctaggccgggcgtagtggctcatgcctgtaatcccagcactttgggaggctgaggtgggcagatcatgaggtcaggagatcgagaccatcctggctaacaaggtgaaaccccgtctctactaaaaatacacaaatcagccgggcgtggtggcgggcacctgtagtcccagctacttgggaggctgaggtaggagaatggcgtgaacctgggaggtggagcttgcagtgagccgagattgtgccactgcactccagcctgggtgacagagctagacttcgtctcaaaaaaaaaaaaaaaaaattcgtatgcttttgctaggcattataacatttaatcctcacatcaaccatggaaattaaaatatattcattcccattcttcagtggagaaacttgaagctcagagaggatgagtaacttgcacagagttgcatagttagtaagcattaaatccagcatagaactcaggtctgaggaactcccaatccattgcttatgttacttcatccacaagtattgtgaaatatacaactttaacatttcaaagagcagaattaaagaatctgccagcttccttttgaataggagaggggtattccaaggtcattagagaactggcctggagctcttaatgctataactcctaccaacactaaaggagagagtgggatcattgtcctgttcccattgccatcacctctacccctaaagcatgcagacatactttatccagagagttgaaaattcacagacaccattcctctcattccttccaagctgctgtggcttagatccaagcaagctccccatgtttcccttaattccaagggctattatctcaggttctgcacatcttacaaagtagatgtagtattgcaagtattgttttatctcaggctaacctatccatttaaagctctggacagtcatgttggtatagtttatgaatgtaaaattcttccttaaacataaattctagcttgaaattattcctaaccaccatctactccaaggccacatgaaattaatcttttacatatgatttttctggaaagtaagtttttgcttctacctgaaggagtacatctttatctgttcagggctcattaatgtttcctctaagatcccacagcagccatttgtaacacttcatggtgcttctcatgcaggcaggcatggatttgctctgaggacaatcaggatatcatcatcatcttcattgtagtgacttctatccctttctgtagtactttgatgtagtattggagtattagatcaggataatacgggatgaaatcctcccaaaataaatcatgcttgactctccgccgaggaaattcctccctctatttaataacggagaaaaatccagtcatctctgagtctagctcaagtatctccattgtgtgaagcttttcctaattcctcatttaaattagtctgtttttcctcttctttgtatagactacaccatgctgcctcctagttctgcttctgattccttttctaggtagtctcaaccttccggaatgagagatattaaggatacaagggtgaaacaggtagaagaagatgtgattttataatttcctttatttactctggttcttaccaaacaacaggtttatcagaatcagaatttttgtagcattcagacccagtttaaccctttttaaaatataacaaacttctttatcctgttgtaaaaacccctcccaaactcttattcagccttccctcaaggtgaagctccatttgccgctacaaagtacttgattcatatctgttatttcatattataatataattatcaaaagttaggggcctcatttccatggcaaccagggtgaaattttgtctttatgacagtcttaaccctacttgattgaattccagaatatccttttgtctcctctcatttttgtgattgaaagcatacaaaatgtctacagttcacctgtctgctgctcccagttttttctgtctaaccataaacgaatctgtgcattcataactaaatcactaactttggcctccagattattttgatagttttagaaataagtgtatataaatatataaataaattattaacaatagagaagcaaatctacaggattgaagtaatatacacaaggtgtgacatcacatacagacagatccaaaacttggacctgatcttcaggatttccagtgcgaggctccttccactaatagatggaagggtggaaagatgccttcttatgccagcgctaacaaaacatgttatgcattgtcattgtcaacatctcactggttgttgtggttatgtggacttttgcagtgtttatattcagaatatggctacgtaagaattagatgaaatataaggaatgactcaaagttggttgtaatatttgaagtcatttcctttattttatttagcatagccacatgttatttggagatagagttttaaatatattgttttacaggttgggtgtccctaatctgaaaatgtgaaattcaaaatgttccaaaatccaaaactttttgagtgccgacgtgatgccacaagtgggtagtgaagatgacgtttttaacactgcagaagaagtgcctataagtgacatggtgaaaatgtgtgatgggattattgaaggaatagagcagcacacattcataacagaacaagaaatcatgtcagtttataaaatcaaaggaaggtttctaagacaaaaaaattcatgaggcagatgactctgaggggaacatttgaaaatcgtatccagcagaattcctcctcatccctataggacccatttccactgcttcttatgttttttcttacctaaaaaaaatgctgtttacagtagccttttaatcaaaacacagcatcataggtggagactgaaagcctgctgctgtttgttgttgctgtggtctaacagctgctataggtatctggtgatgcaactgtgctgcttagctacacttaacacattactttttcactgtattaatgatacgccatattttttttactgttaagtacttatatctgactaaatataagaaaatgattgcttatcagtagcatataaattcagagtcaggaataagctcatgccaagcaaccacagattgtccgtatgggtggctgagatagtgacacctttgctttctaactatttaacgtacacagactttgtctcatgcacaaaattatttaaaatattgtatatggccaggcacagtggctcagcctgtaagctcagcactttgggagccgaggcaggtggatcacctgagatcaagagttcgagaccagcctgatcaacatagtgaaacgctgtctctactaaaaatacaaaattagccgggtgtggtggcacatgcctgtaatcccagctactctggaggcggaggcaggagaatcgcttgaacccggcaggcggaggttgcagtgagccaagattatgccattgcattccagcctgggtgacagagcgagactctgtctcaaaataataataataataataaataaaatattgtgtaaaattaccctcaggctatgtgcataaaatgcatataaagcataaatagattttgggtttagacttatatcccatctccaggatatctcattatgtatatgcagatattccaaaaatcagaaaaaaatcccaaatctgaaacacttttggtcccatgcatttcacctaagggatactcaacccatattggcatataatttttttttgtatatattcttcttcataatatattcaataagataatccataacttttttcgatatgagattagatttttaaaaatacattgtctctagtttcattggtcacttaggaaacaatagactacactgtgtcatttaaatagcactgattagccaaatggccattttaaattccaattcttactctgatttaatagccaatagaagaagtttttctagaggcaagatcttgtcagaaacaattaatgggttgccctttgtggcttctttgttctttttagggtattcttttctatgatttcaaaggttttttttttttttttttttttggtagatgacacagaaacttctcagtttattcccctgtgtcatctaaaatactataatttgccacagaaatttgctctgatgcagtcccctgaaatcattctaccaccctcaattgtggcaggaaatatgtttaaaatgttgtctcagtataatgcaaaagccagagttaagagtgatatggaaaagtgatccgatgaggtggagaggcaagaatagtagcatgaatctcagttgtgtatattttgacaagaaataggaaggggcaaaaccaaggagaaggtggcagggatggagaaaagagggtggctttccaagagataggcttcgtcttggttctgcctgcatagttgcagcacttgagggttggagagggaccacagggggtcacagagctatgtctccagcatcaaaattagagggcccaaagacataattcagaagtttgggatgcaaacttttttgaagttctctcatgagatctgccatcaagatcctgactgttgtcatattgagtttgttttcatagcaagatttattgttatcaagttctatcgtaccttgtaaagctttttttaaaaaaaacttcagagtgattttgagctatagtatggcaaaatttataccctgctacctttctggagccatacaatatactacgacagaaaatataaggtggcacgttgtatataatacaagtgataatggaggaactgaataattggaagtactctaaaactacacccagacacgggggtgggggatagcagtataaaatgttcatcaaccaaagtcaaagtataaaaggagaagcaggactttggagcaggagtgtaagatctcagggactcatgggtggggtgagggtggatatgggagaataactttacaaaatattgagggtaataattacaaagtttggcctacccagaaagactagatagggatgctgaaaaaggtgaaagcgctcacctttttccagccaagactgactatacgtaggtggcttcattctgaaaaaaaaaaataactgatttggacctcctctgggctgtatgtgggcgcagttgagaggatgtactgtcccacctttctgataaaggaactatgtaaataattgctttgttgccaattttaaggaatgacatgtctgtattgtatttctcctcacctccccacccccagcctgctcatttacatttcttttagttctttgaaaaatagaaatcatcactggaatacatgataaccattattaatttcttttgactttcattttctaagaataatgaatacttacctactaccctccatgctactaccgaaaagtggattggaaaataccctttgaaccagagtcttcagtagagtgtctaggtcaggagtgccctgtttgagccattgtgtcctttagaaaatggcagtttatctggcaaattcttgattggggaattgtagatggatcaggcattgtctgattcccttattttcttttacgcatataatttgccatcttataccttttcaaatatattgaattgtccttagtatatgtaatttatttccatagagtctctagcttgttgtactaataaagtgataataataacagtaatgacaataataataataatgtcaacctttttgccaaagaattatttgaatctgaaaaaatgcaataataggtataactgaaagtatgactctatgaagtgatcttaccttatttaagccagtaattgcattgctatttaaagatttttttttgttatggttcctcatggaacagaaaagttctaattgattgtcagcaaatactgtgactaaaattaatatttattacctaactggaaaataatattttataatagtttgatgacattttaaacagattttgaaatctaaacatatttttattgctggcacttctagattcataaaattaagtgacagatgaattcgaatgtgtttgaggacctatgtactatcagatcacaacaaaacttcctaactgccatacaccaaaaaatagacttagggactaaaccttgtcttactgcactgtacagtgtacttttttctgttttctaattgcatatcctctttttctcttggaaaacgttcgataaaagtactttaagaaagaaacttgaagttgagctcctgctattggaaaatgttctgtgtactcttaatgaattgtttgtatatttgtcattaaaacatttaattatattcttacattacagtctttgttttatctaaacttgtgtttccaagggtatatctgagtaagatttaactgaacacaccacactttcagattggatattttactcaaataagacatgattatattacagatggaatacagtcaattataatatttctacatatgttagaagagcaaaggtgaaacagcgaaaactcattaaggatttaataaaaggagccaaaatattaccactagcatttgttaatctaagtgctaaaaatgtctgcctctgaagccagcagaaaacaattatttaagcaagtggaaaatagacaatgaggaaaatggtgctttcaaatatcttcactatgtttgtctatgcaatgacatgataggaagtagaaaagactgttgaagtgtaaagtgtaccaaacttagacaaatactagaaaaaggtctagaatggttaaaaaccaaaggagtttaaggaagctgaatttccttaagaccatgtatctattaatttaccttcttgggaacttcatctgcccaaatttgcactagttttttcttgaggtttaatttaaatctacagtactcactttaaaaaaatccttaatttggttgtaagcaataatatctgtaaataaaagtgtaaaattttagcactgtctaccacttaatcttttatgtgtcccactatggacacactgccttggggaagatgttaaatatatcggagggtaactgtttctataaagatgagaagtaagaaatggaggaagaaatctagagagctaaatacagaattgcataattaccagaggcaggagaaaattgcacaaatctatgctaagtttatccaaatcaggtctctccaattatattgtgagtgggtgatgtgagcctatctggagacttttctgtttcccagtcactgttcccccctaataattatcctgactatatgggatcagaaaaattttggagtgggctttggttggccacctttccctcatctagaggatttgctgctattcttttattctttcactgtataaaaaccccaaagaggagtctctgttaaaatctactgatttttttctatttattctatgtatccctactttaatattcacatattctatgtattatttatatattttttggtctctttcccctcacttgtatatagcttcatgaagacaagaatttgtgtgttttgtttactgccatattttgaactcctagaacagaatctggcacacaccaaatgttcaataaatatttgctgaatgaatgaatgatgaatgattttagctttgaatattatctcatgttcttgttatttcttgtcccctgtcttgataacaaatttcctctcacccagcatttaaaatggattttttcttcttgcattgtttagtctcttccttttatttaggctgcagcttttaaagctacattttatttagttgtagtattaatttatagctgaagctccaaaaatgttttatttttcttttatcatggtaaaattaatcctttaattttattctcccttgtcattgatcatttctagcataagattaaaattatatacttcattaattttcctcacactgcaaaatttagttttacagtatggtatgaaccctgttgttttgagtgttgttatacttcttgtgctttaaacttttgtcatttgatagaaatggtacatttcgaagggtacatgtaaatggtatatttttaattttgttttctttttagcactcaaggagattctgacagaaaatggtatattttatgagtagtgattttgtgaaaagcatttcagagcttccatttcccctcttgctttgataaataccttttacttcagataacatggtagttttggtctgttgttagtaaatatagtcttatggttttcaaaagaaatgttttaacataacttatttttacttcttcactttatatttctttaatgcttaaagtatgttctcaacaaataactgaggcagaacataggtgattaatcaatatgactagagtgtgtttttatcttcgctaagatatgtatgtgaaagatgatatagtatgttttccccaaatatactaatttctcctactttggatattttctaagattttaaactatatttttagattgttaatattttcataaaagctactttaaaaataatgtccatatatgtttgaattgttattacctccaagcctgttcttattctctacacttccttgcaattgaaatcaagtacaatgcttttgatctacaattagaatgtttatcatcaaggggtgagaatctgaactttttcaaacctctggatttgaaattctgtgtgttttctgagtcaaaggatgagtacatctttgaacttcataggccgtaatgcaaggcagacagcaagaaatacaaatactttcccttcttgtttactgtgagatacagacgtgcatttatttgtttcatatgcccctcactttttcagtctaaaccaatgggtgcaattaaattagaataaatgtaaaacaaaaaattaaagtaaaacatcatttagaaaattcagggactgtcaaatgggaaaagcaaatagatttctaaatgcctgataatttaaaacaaaattaatacaaaaattaacaaatagagcattaaaaaaagatagatatgcaaatatattaacatggaggacatttgtttttctgaaagaatatgtaaatctgcaatctttatgaaacgaatttatttaatacatttattagtgaattattattcaggcctgaattttgtggtatattgaggattttactattatcattttgcttttcagttattttccattgtcctaattctctcaaaaatatttggaaactattttttcaatcaaattttcaatattcaaaaatttgacattggttttaagaactgctaagaatatacacttgaatgtatctacatgattagcactgaagtgtcatttttaataatttagtgaaaaaaaagataaagattgtgtcttagtgtgtggtaatataaaattaagatacaaatagggcctagttttccatatatgttaaaatattttattttatttttatcaggtaaaattgagtctttaattatattctctttagtcatttattatttatttctagtaaaataaggagagttaccttttatctaaaagaaattcagctagttttccctacgaaatactaaacatttccacgaaatagttttttaccagtgttgctaagaagttgcagtaaataattttgttctatccatattttagtgattatgctatagctagccctcttttctaaaaatggaattaaaaagaagtgtaaggttaatattgttatgtgtgaatttgatcctgtcattatgatgttagctggttattttgctcgttagttgatgcagtttcttcctagcctcgatggtctttacaatttggcatgtttttgcagtggctggtaccggttgttcctttccatgtttagtgcttccttcaggagctcttttagggcaggcctggtggtgacaaaatctctcagcatttgcttgtctgtaaagtattttatttctccttcacttatgaagcttagtttggctggatatgaaattctgagttgaaaattctttaagaatgttgaatattggcccccactctgttctggcttgtagagtttctgctgagagatccgctgttagtctgatgggcttccctttgtgggtaacccgacctttctctctggctgcccttaacaatattaaccttaaatgtaaatgggctaaatgctccaattaaaagacacagactggcaaattggataaagagtcaagacccatcagggtgcaaagcaaagagttggaaccaagccaaatgtccaacaatgataggctggattaagaaaatgtggcacatatataccatggaatactatgcagccataaaaaaggatgagttcatgtcctttgtagggacatggatgaagctggaaaccatcattctcagcaaactatcgcagggacaaaaaaaccaaacaccgcatgttctcactcataggtgggaattgaacaatgagaacacatggacacaggaaggggaacatcacacaccggggcctgttgtggggtgggggcaggggggagggatagcattaggagatgtacctaatgctaaatgatgagttaatgggtgcaacacaccaacatggcacatgtatacatatgtaactaacctgcacattgtgcacatgtaccctaatacttaaaagtataataaataaataaataaataaataaataaataaataaataaaaaagaaaatgtcattccattgtcttctgtctcattccaggaagtcagctgtaactctcattgtagctctttgaaagtaatatgtctctgaatcacattctccctctctctcttttcacctctttaaaacattttttgtctttgtttttcagcagttttacttttatgaagggcctagatgttgtttttttcttttctttttgcagtatttcatagtgcctattaaatctgtggcttcatattttcaattttgaagagttctctgcctttatttgtttagattagttttttcccattttgtctgtcccccaagccctttctttaaatttagttgctcacatctaggacttttttcctaagggtctcttagatttattctctgtattttctttttgcctttttatgcctaaatctgtccgtattctagttttgctattcagtttttagctgcatctaatcagctgcttatcccgtacttgggttcttattttcacttatactttttctagaatttttatttgtttttctttttgtggtgtctatttatcttctgatataaccaacttttaaagaaattcctcacgcatattgatcataattatttcaaagttcatgactgataactctattatatgaattcttgtgagttattttattgtagtatttttctcttagtttttgactatgtcttattttcatgaatacatgattattgatttatattagacatttttttgttttaaaatttagcaaaatgttgaggctctgaaacatgttatattcccttagagaagatttacttttgtttctggcaagtaattggcctgggaatggcagtattccatgattaccttaatgccatcaaaacttgagattattggaagcttgccttcatttcttgagatgctagcctatttaagaccttgcactcttcctaaggtctcctaatggaaagtttcttgtgtctagtctttcctatttgttaggccataaactttcatttttatcccgtttaagccccagaatcttttggaagatctgttcaattttctaacttctcagctcccactgcagattctagatatttggcttagctatctgggatttactctactaccttcatcctttcacatttctttctgctttggtatttctctgatggcttctaataattgtttttatattttcccatgatcttctaattgttttcattattatgttttgtgttacacattctagttcaccactggcagaagtagaagcaaagatctggtttggttctatgcttcttagtcccagcctctcatgcataccaaagacattacaagggagacaatatttgtcaccaaaaacaaaataaaacaaaaaacaaatacaaaaaaattcaccatagcactagtggtctttaccctgcaccaataaggtacattcagatgcaagagagacttgttaatgtaaacctcccatgacgatgatgattggtacatgagtggtcaaaatttaaatcagagcttctcttctcttggctaggcaccaaggtctagaggaataataatattagatatcatcttcctgaggaaaaaaccattaattctttatatagatgtcagaattttaagatgcagattactttaaatttgttttacctatttttactccttttagttttttaccttcattttaaacctaaaagtggataatttttaaggtttatatatagttaccaggtttttttaaagtacagtaaaagaaaaagtatagtatagctttatgttgtatgaaaactctaaaagggaattttttcactatagatgaaatcttttaaacataatacttattttctgttaagattacttaaaaatctgaggtaccccacatggtggcctcataacccaattaagattacttaaaaatataaagagagacaaaatgtatgcataacttttaaaatttatttttatatgaaggagttctgtaatttagtgatgatttataaatcaacttgcctgtcctttatttatttatttaaatagtttttggggaacagatggtttttagtcacatggataagttctttagtggtaattaccgagcttttggtgcacgcatcatctgcgcagcatacactgtagccagtgtgtagtcttgtattccttgcccccttcttcactttccccagcatccccaaagtctgttttgtcattcttatgcctttgcatcctcatagcttggctcccatttaaaattgagaacatataagatttggttttccatttttgagttgctgcacttagaataatggtctccaattccacccaggttgctgtgaatgccattattttgttcctttttatggctgagtagtattctatgatgtatatatgccacattttctttatccactcattggttgttgggcatttgggttggttccatatttttacaattgtgaattgtgctgctataaacatgcatgtgcaagtgtcttttttcatataatgacttcttttcctctgggtagatgcccagtagtgggattgctgggtcaaatggtagtcctacttttagttctttaaagaatctccatactggttgtactagtttacattcccaccagtagtgtaaaagtgttcccttttcaccacatccttgccaacatctattatttttttattatggccattcttgcaggagtaagttggtatctcattgtggttttaatttgcatttctctgataattagtgatgctgagcatattttcatatgttttttggctatttgtatatcttcttttgagaattgtctattcatatcatttgcccactttttgatgggattttttttcttgccaatttatttgagctccctgtagattctggatattagtcctttgtcagatgcatagcttgcgaatattttctcccattgtgtgggttgtctgtttactctgctaattgtttcttttgctgtgcagaagctttttagtttaattaggtcccatcgattcatttttgtttttgttgcatttgcttttgggttctttgtcatgaactctccctaagccaacgtctagaagagttttacctatgttatcttctagattctttagtgtttcagatcttagatttaagtctttgatccatcttgagttgatttttgtataaggtaagagatgaggatccagtttcattcttctaatttttaaaattagttaatttattaatttgttttttcccagacagagtcttgctctgttacccaggctggagtgcagtagcatgatctcagctcactgcaacctctgcctcccgggttcaagcaattcccctgcctcagccttctgagtagctgggattacagccatgtaccaccatgcccagctaatttttgtatttttagtagagacggtgtttcaccatgttggccaggctgatcttgaactcctgaccgtgtgatccacccgccttggcctcccaaagtgctgggattacaggcaaaagatttctttaatgtcacctcccttaacttgagcagttagaatggtttgaaaaaaatgagaaatattttgaaccttgtaaatttacaaattcatatataaacttagggtgctaaaacaaatagttctttccttttaaattttataatttgattttaatactctttctgtgtcaattatgtatattagcccaagttctatcctttgggagctattttgctttgtttctgtagctcatacttaccctcagcttttcattctgtgaaagtatgctatttactgcaagggattgtgaatttagtttcaatgtaactggtaaaaacaaaaaaacagaaagatgagctgtttatgtaccattagtcaaatatttattaagcagctgctatgttttaagcactgtgctaggtgctggggacccaaaaatgaatgaaacagccttttcttcagggagctgctggcctaatggggatgcagacaagaagaaagagagttatttatggtgtgataagtgcaactgtagaattaatggagtatactatggaatcacattcttttctaacagttgctgaacagtgtcttggtatgtagagaagtagtagcctctgctgtctatcctttgtttatgggatatagaggggaggcggggaaaactcatgaatcaatcagttgttacagaacagcattccaatgagttgtgtaaaagaattggaaacagattgaagttccttaattcatgaatctctaaaagtggttggggacaagtgtgctttgctcttgccaaagtgtagtgcatgaaagatagtgtgtcattttactgacccatatccaccctcaaattaagttactcattgtgctctcatcagattttaaaagagaaatgcaaaacatggatattagtagaaatgccacaaaatacaataatcagataaaacagtcttaagaagaacactgttttgtgtgtgtgtttgtgtgtagaagtatgagtacatatgtgtttgtatttttgcatggacatacatttatttgtgtatagtgagtatttatatgaaggtacataacaaaatgaactatggttaaacatatttatgccactagtgggtagtgttagtggagactgtcagaattaacttcataggatttctcagtgcaaaaaaatgtcatgataatgtcatgtctgcctttctcaaagataaaggtactttgattaaccctaagctccctttttttgttttaagagacaggatctggttttatcacccaggctggagtgcagtggtgcaatcatagctcatttcagttacggactcctggcctcaagggatcctcccaccttggcctcacaaaatgctgggattacaggcatgagccaccacacccagcccctaagctccttttaaagaggcaatgtgatgtagtggcttaggacacagtctggacagactgcctgagtttaaatcatatatctatcatttgttatatttgacacattccttaactttttagtgtcctggtttatttgtctataaaacattttaataatccctatcttatatgctcttgtgagcattaaatgatatatgtaaagttcttaggtgaataatgggtatgcagtaaggaatacataagtataacaaacactgatggttacactttatgtggaaggcctattccatactgagaattggttatggcagacagatttgtggtattctttctttgctctccatttccttcaatggcttaagagtacttgggacaggatttagggagatctacagagtaccatcataataagatgtaaattacatgcaaatcagtaggtacatattatttgtccagcatgtacttgatgttaaaagaaaatttggatacatagtgaaaacaagtataattcctcagagattgtttggagtccttccaagtgtttttagtgatcagaaaatactgaggtgtttagctgatgagaaaataaagagaaaaaaaggggaagctattgtcaagtaaaatagagacagtcactttggaacatcagtaagtgaagtttttttatttcattgtagaaatgaggaagcatgttgaaaaattaatttgggttagtaacaaaatcccttttgttgtgatgtttgtattcttaaccaaaaatctatcttttttctactttcgcatttaatgtgacttttttcctatacttattttgaactcactgaaaatatactttatatcatctcttttgttttaacagttatagttcagagtaggtgaaaaataagaataatatattagtttcattatcactacatctgttatctacacatgtgtgtgtatgtgtgcgggtgtgtgtaatctgaaaaaacatagaattgaaaatcaagaaacctatattccagccatagtttatctcacctataagatgtgtgtatgttgaatgagaacgttatatatgcaaatgatttattcgttccttcccctgttcatttatttaatttattgaatgtcttttatgtgtcagatactgacagtacaaaggtgagtaactcatagactctgtctacaatatactttacatatagtagaagactaattcacagtagagcatgtgacccaagccatgtaatcaaagtcttcttgggaatttttgtgggagtcttggagaaacgtgattttttttttccttttgattttgtgctagaaggacatgataaggataaagatgctagtgaccatctcttagaccatagtgttttggaaaatgaggtcaagataaaagaaagcaaagctaaaagctggagaggagacaatatgtttctttggtgatagagatgcaagaaagggaaggctttaccaggtagaggaggcaccacaaacaaggacatggagagatataaaacaatataatgttctaaatgaaatgtaagatgtgcagaggggttgaaggaatggagggaaagttaggcagaggctaagtataaaagatcttttaatcttgcaggtagtggggagccattgaagtactttaaaaataatctggcaataaagtaaggagagagaatctacatgatgtggtaaatgacctaattgggaaggtgagagaataggtggaatgtaggttggcttcaaggtttcttctgatttgggtgtctgattgcattgtgttattattcaaaaagataagaaattcaaaaggagaataaggagaaaagataattactgttcttttggaaataatgaatttgaagttcatttggaagatctacctggaagtgtcttgactaaagttcggcagagggctctcttagttgaccatccgattacagctatcaacacagatgtgatagtggaaaccatgaaagtgaatgtaattacttggaaagagcaagtagttctagaagagaagaaagatggaggcagaactttgggtaggtgaaagaacatgaaaggagactaaaagggagaggtaggagagggagtggtgtcatggaggctagggaaagaaaaggtttaataagaaggcctgctcaataatcaactgcacagagaagtcaaacagcattactgaaaacaatctattggattttgcaattaagaggatatttatattcatccaagagcaatcttttttgagaatagagtgaggaggtaggccaaggtatgattgtagtggattgaagagtaaagagaaaataaaagaaaagagtgatagtagttctagaataacgtaggattgaggaagtttggtttagtttggattgtaagatggaaaaccacttaaatagattttgaagaagaggtcagtagagaggcacagattgaaaataaaggagatggagaaagtgaattatcagtgaatttctggagaatatatcaaggaaccatgtggagggtgacttttcgttaggaatgcacctttttttgatactagaggaaggaagggagaggatacatatggacatggataggcatatcagtcaagttataactatccccaaaagaagccacttaaagtgtttaaaagagaaggaatttaatgcaaataatttgttaataggtcatggaagaattggaaagctaaatagggaattgtaaaccaacccaataattaacaagagcatgaagccaataagctggagggacaaaaaaggaggtagcattactaggagtggaagctagaaccatgccatcctgtctgttaccctttgaaggaaacaagctctggtagagataccatcagaggcagagggtaggggagaggaatgtcctagcttctctccactttctccctttcagtctcctgctggtgccccccagacatccagcatgaagcctccagggtcaagctttgtgccatcttaagcagagccaggaaaaagaacaaaaggctctgagctcaaacaggcccatgactattataatagggttggaagtgtgtgagagaggaaagaaaataagaaacgaagaaaagccaggcatggtggctcatgcttgtaatcgcagcactttgggaggccaaggtgagtggatcagttgagcccaggaggttgagaccagtctgggaaacatggtgaaatcccgactccacacacacacacacacaacaaaaagttagctgggcgtggtggcctgctaacttttactcccagttacttgggaagctgcagcaggaggatcacctgagcccaggaggtcacggctgcagtaagccatgattgtaccacttcactccagcctgggtgacagagcaagaccctatctaaacacacacacacacacacacacacacacacacacacacacacacacacacacacaacacaagtgaaggaaaaagatggtaggagtatgtgcatgaaaattggtaaagctactatgaagaatggttgaaggaaccgagcaggcatatataatacacaatgcaatttggctgatgatccatttcatttctagacaagaagttgctatagcaccaatttgcactactggacgtaccaggaatacatgtccacaggaccagagaagcttctctgagatccaagtaaatatattgtaagtaaacaagtgagaaagcttacaggagaaagagcaactgtgagagactagtatgttgtcatttaagattttggaaggggaacagttctaagtactaggaagttccatgaaaacataagcaggggtgatttctgtgttgcagagagggtaaaataacttgcatactaggtaattgagagctattgacatgggtgttgaagtcagcagtgattataacattttttagggtaaaaaggaagaccaagtcaggtgtccaaatcttcagggaattaagtgatcatctggaaaagacaaggatgataacagtaaagagtagaaagtgatacacttgatatgtgtctctaagagcagagggttttgagataaggttgggaaagtaatggtataaatatggtgattaagagagtgctacccatggccctgtgtcacgtgaggagagaatgaggaatttccttatgagaaggccaggatctagttgaaggaagaaggcttagaagtgttctggaattaggtctaaaatggcaggtaattacaacaaaatgagaatttgagagcaaaatgggtagaggccagtagagctgtaggaagaaaatggcagcttggggaataacactgtttagacaattgatagatgagactgaattttgttgaggggcaaataataaccagaatgcaaaagactggttggatcagctggcttcaaaattcctggtctaggaaggctgaagtccttgtaggttttggagggcccctgtgtttagtagcctttgctcagtgctgatgtttcatgtgctgcttctgttcctccctctgctgttcattcaaatatattacacttggaaagtagttcttgtctcttcattccagcataaccttagggtccagtttttagaagtttgaatgtttacactgggttatcattattcactacagatgcatttccaagtatcacagtgaacagatgatcagctgattctttctacattagcatagaaaagagtccccaggtgtgagaatgggtcctggtaagggttgtatgatggactttcttattttcacagaggaggtattcagtaaaatgtttctgaagatgatcttgatcagaggatggggaggaggaagagaaagaaaataaagggggtaataaattaatgaagtggctaatgaccatcatgtggctgactcaatatacactcttatccatgtaccaaatttcactgaatctaagggacttttttttcacattttttacaataaatttttacaatagtttttttcacattttaatatttgtgaaatgttaatgacattacaattagaattggttatatcttttcttttgtgtcagtccatacaacactctcatggatttagcaaaatctgatgtgtgtttattttcattcttatttgcccctactatatctcacattttaaaaacgcttgttttctttgtgcttattttccttaagttctttaactctactcaaattcaacctgttccccgccttgtccttttttttttttttttttgagacagagtctcgctctgctacccaggctggagtgcagtggcgtgatctgggctcactgcaagctccgccttccgggttcacgccattctcctgcctcagcctcccaagtagctgggactacaggcgcatgccaccacgcctggctaattttttgtatttttagtagagacggggtttcaccgtgttagccaggatggtctcaatctcctgacctcgtgatctgcctgccttggcctcccaaagtgctgggattataggcgtgagccatcactcctggcctcccttgtactttttattgcaacttcatttttcttttggcttgtagttttcagaatattgttttttctccaaatcctcagctttaagaagatagaatataatacacattctctaggcctaactcttttgttaagtatcacatggctcttgggcaagcaattcaacctctttgggccataattttcttatatataaaatgaggggttaagtctaatgataccaatagtctctttctgttttgaaaatttggggtttcttgatcatcagagggctgaaaaatccctactctaagcctttgagaggaatcagggcagaggataaggatatagagaactctgcctcttttcttagactcattccttaaacctgcatattctacatattctctgatctacatattctctgacttttgttgctgccaagctactctggctcaaggtttttatgtctgggcatagacatctagcaacatcatcttcatttatatagatctactagataaaaaaatagcatatgtccctctcttcaagtttagtaaaaagagtcaatattttttataatacataatttggatttttaattttttcctgggaagttattgttttctgttgtctctagcacaaattgaagattaagtctcagaatggaaagtttagaagagactatttgctgtggattactgttatatgtatatgtatttgtatttgtatgtataaagtataccataaaataaggtagcttgctagaagtcagatcattagttatcaggtcacccagaaagtggggattgttttattgcctgttggaattgaaatggtgtttctgtagaacatattgtaatcagtattttttagcatggataaatactggaaaataaactcagttggaagtgaaaatagttgaactccaagttctttttatttgccaagtgatgactttgggctagctaaaatatctattaatttttaagggaaaattaatggtagtgtcaggtcttaattacagagtagatactacattagattatcactagaaaggacaaatgatccaagagaagttatgttagtggccctatatgtaaggaaactagctcggaaggaagctaatagttccttacgatttcctagggaaattgctttaaataatctgtagtttggtagatattcatatcccaaaagtcacttaatgacagcacaggttaagactacaacagtgctgcaaggaagtgtatatagttcatttaggggaataatttaatatgagggctagaatataaaacaaaatgtagagttaacaattgtctagcaaattcaagaatgttggtagggaagcactgacttaaccaatgacgtatacaattattagagagttactttggtcagttaaagcaaatgcaaaaataacaacaaaaactaatctttctcaagtatctattaacattctagatattctctattttaaatttcaagaagggcttagagatagggtgaacatgtaatttatcattcaaaccagggcaataagcataaactaagcttattcctggaaatcaagggtataaagttgctctagttaggtcttaccatgtgtctactctcatttctgattattgctaaaaatgttaagaaatgaactagttaacatgccaactgaagagaaagagacaaaaatctttctcagtaagcctctaatctgttgattctaaccttttggggagaactgatgtcttggaaagtgatgacatggactctctccaatagaagtgaattgaaaatgaaatatgagggattcatagacccctgaaaaccattcatgggcaagaatcttagcttaaagccagaaaaaagaaataggatatcaattttttattatggtaaaagagctacccacaagcaccaccactactcaaacacattttgatgaactgtaacataattaacatttcttattataaataattcaaatatatacaaaaatagaaagaatattataatgaaaccccatataactatcatgtgaactcaagattgcataagatttgtccatacttgtttcacctattcccttttttagttgtggttgtttctgaagcatttttaaacaaatcccagattcatataatttctcccctctatactttagcttagcagaatgtcattatcacaactaacaaaactgacactgattcttcagtatcatctgatactctattcatattcaaattttatcagttgtgtcaaaaatgttattttccattggatttacttgaattggtatccaaacaaatatcacgctttgccttttaatttttatagtccctctactgccataacctttctccctttttgaagcaaactggtgcagttgtgtcatattatggatttgattcttaatcccctatatttcttgtaaacaagaagtgagttgttaggcttgcttagattcagattagatttattttcctttttccaggaaaatttccatagatgatggtatatatttcataggttatgctctataaactgatattttaggaattgctgaatcagaaattagaatcttacgaccaaaagaaacaccaggactaattcttttttctcactttccaaaagtatctgtggtccatccaatgttctttcagccatcaaaatattaactattcatatgaaatatttataaaaagtgacgtcaactatatttccctttaatattcattttaaattattacagtgagcatgtacttttcattcttgtcccttctcttttctggtttcctttatcccattcttttaaaaacaagctatcagttcccatagcagcctttaccaaggtagataaatatcaacatcatggttgaaataccaaagctcagtgccagcaattatcctacaatttgtgtgttggcgtaataacacacagggacttgagcacattactaatagccattgaggggagcaagctagtctctaaacatattaaaatgcctcagaggactttttcagcactacataatcaagatttggtgatacgagctgctttgttaggacttgtgaattttgcattgccttattgtgtgtgtggaaattagtgccgaccttcataaattggcttagataatacacagatcaaccaacaggagacagaactagccaaataaagcatatggcaaatcactggaaaaagagcgtattatgtagtgacttttaatttggaaatgagaatgtaagaatatctccaatttaattggggcttgtctgaaaaatgcgttgatatctgtcatttcagaattgaaatgttttgatttgctgaagttttatttgctttgctgaggacaaggatactaccaggaatggggtctgacaaaaataaattattaagttgggttattcttatttttattctttttcaagatagtattggcaaaatctatcttgttattcttagcaacataaataagaagtattttgggggtaaagagcatattagaaagaagtttaaaaattttctgtcttttgttatatttgattttcaggaaaataaggtgaaaaaacatctattttcatacaatttctttggatttaattatacaaatagtcattaataaagtaagaataatgcatggtttactggataaaatttgaaggatttctgttaacactgaagccattctttaaacatgctggaatttggaagtcagattttcttcagcgtctttgataaacttgtgggttttttttttatcatgttgatttttaaagagtgtttttggatttgtatctccctttatttatagtttattgtgttaaaaccctcctaattgccactcctcatcctaaccctgggaaaaattcttgttattggttactcccattccttagggatattatataagcttttttacctactactccaagaaatctgcattatatgggcattattatgtattatattcaataaagaaattatagggcaaggcagctgccacatgaaaaatgacttgtttggtattgtctgtttttttagagaggggcatggaataaaattaaaaatatataaggctcataaagctttaatggtgtgtatatatattaatttctctcaaaaacaacatatgaaagtgtctatatgcacacaaacatatatacacacacatatatgtctacatacgtgtgtgtgtgtataaaaggagtgattccattgcaaggtggatctaattattagactatgtcctctcaaccgggcacagtggcttatgcctataatcccagcattttgggaggctgaggtgggcggatcacgaggtcaggacattgagatgaacctggccaatatgttgaaaccctgtctctactaaaacacaaaaattagctggttgtggtggtgcatgcctgtagtccgagctccctgggaggctgaagcaggagaattgcttgaacccgggaggctcaggttgcagtgagccaagatcgtgccacagcactccagcctggcaacagagtgagactccatctcaaaaaaaaaaaaaaaaggttttcaagacaagtaccatgtctctcaacctcttttttcaagaccaaatgtcttgcattttctcaactcaactttttttcctatgtcatcctttcaagacacttcaggtgagagagccaagatggccgaataggaacagctctggtctacagctcccagcgtgagtgacgcagaagacgggtgatttctgcatttctatctgaggcttaaaaaatggcgcaccaggagattatatcacacacctggctcagagggtcctacgcccacagaatctcactgattgctagcacagcagtctgagatcaaactgcaaggccgcagcgaggctgggggaggagcgcccgccattgcccaggcttgcttaggtaaacaaagcagccaggaagttctaactgggtggagcccaccacagctcaaggaggcctgcctgcctctgtaggctccacctctggggacagggcacagacaaacaaaaagacagcagtaacctctgcagacttacatgtccctgtctgacaggtttgaagagagcagtgattctcccagcacacagctggagatctgagaacgggcagactgcctcctcaagtgggtccctgacccctgacccccgagcagcctaactgggaggcaccccccagtaggggcagactgacacctcacacggccaggtactcctctgagacaaaacttccagaggaacgatcagacagcagcatttgcaattcatgaaaatctgctgttctgcagccaccgctgctgatacccagacaaacagggtctggagtggacctctagcaaactccaatagacctgcagctgagggtcctgtctgttagaagaaaaactaacaaacagaaaggacatccacaccaaaaacccatctgcacatcaccatcgtcaaagagcaaaagtggataaaaccacaaagatggggaaaaaacagagcagaaaaactggaaactctaaaaaacagagcgcctttcctcctccaaaggaatgcagttcctcaccagcaacggaacaaagctgaatggagaatgactttgacgagttgagagaagaaggcttcagatgatcaaactactccgagctacaggaggaaattcaaaccaaaggcaaagaagttaaaaactttgaaaaaaatttagacaaatgtataactagaataaccaatacagagaagtgcttaaaggagctgatggagctgaaaaccaaggctcgagaactacgtgaagaacacagaagcctcaggagctgatgcaatcaactggaagaaagggtatcagtgatggaagatgaaatgaatgaaaagaagtgagaagggaagtttagagaaaaaagaataaaaagaaacgaacaaagcctccaagaaatatgggactatgtgaaaagaccaaatctacatctgattggtgtacctgaaagtgatggggagaatggaaccaagttggaaaacactctgcagggtattatccgagagaacttccccaatctagtaaggcaggccaacattcagattcaggaaatacagagaatgccacaaagatactcctcgagaagagcaactccaagaaacataattgtgagattcaccaaagttgaaatgaaggaaaaaatgttaaaggcagccagagagaaaggtcgggttacccacaaagggaagcccatcagactaacagctgatctctcggcagaaactctacaagccagaagacagtggagggcaatattcaacattcttaaagaaaagaattttcaacccagaatttcatatccagccaaactaagcttcataagtgaaggagaaataaaatactttacagacaagcaaatgctgagagattttgtcaccaccaggcctgccctaaaagagctcctgaaggaagcactaaacatggaaaggaacaaccggtaccagccactgcaaaaacatgccaaattgtaaagaccatcgagactaggaagaaactgcatcaactaatgagcaaaataaccagctaacatcataatgacaggatcaaattcacacataacaatattaactttaaatgtaaatggactaaatgctccaattaaaagacacagactggcaaattggataaagagtcaagacccatcagtgtgttgtattcaggaaacccatctcacatgcagagacacacataagctcaaaataaaaggatggaggaagatctaccaagcaaatgtaaaacaaaaaaggcaggggttgcaatcctagtctctgataaaacagactttaaaccaacaaagatcaaaagagacaaggaaggccattacataatggtaaagggatcaattcaacaagaagagctaactatcctaaatatatatgcacccaatacaggagcacccagattcataaagcaagtcctgagtgacctacaaagagacttagactcctacacaataataatgggagactttaacaccccactgtcaacattagacagatcaatgagacagaaagttaacaagaatacccaggaattgaactcagctctgcaccaagcggatctaatagacatctacagaactctccaccccaaatcaacagaatgtacatttttttcagcaccacaccacatgtattccaaaattgaccacatagttggatgtaaagctctcctcagcaaatttaaaagaacagaaattataacaaactgtctctcagaccacagtgcaatcaaactagaactcaggattaagaaactcactcaaaactgctcaactacatggaaactgaacaacctgctcctgaatgactactgggtacataacgaaatgaaggcagaaataaagatgttctttgaaaccaacgagaacaaagacacaacataccagaatctctgggacacattcaaagcagtgtgtagagggaaatttatagcactaaatgcccacaagagaaagcaggaaagatccaaaattgacaccctaacatcacaattaaaagaactagaaaagcaagagcaaacacattcaaaagctagcagaaggcaagaaataactaaaatcagagcagaactgaaggaaatagagacacaaaaaacccttcaaaaaattaatgaattcaggagctggttttttgaaaggatcaacacaattgatagaccgctagcaagactcataaagaagaaaagagagaagaatcaaatagatgcaataaaaaatgataaaggggatatcaccaccgatcccacagaaacacaaactaccatcagagaatactacaaacacctctacgcaaataaactagaaaatctagaagaaatggataaattcctcgacacatacaccctcccaagactaaaccaggaagaagttgaatctctgaatagaccaataacaggctctggaattgtggcaataatcaatagcttaccaaccaaaaagagtccaggaccagatggattcacagccgaattctaccagaggtacaaagaggaactggtaccattccttctgaaactattccaatcaatagaagaagagggaatcctccctaactcattttatgaggccagcatcatcctgataccaaagctgggcagagacatagccaaaaaagagaattttagaccaatatccttgatgaacattgatgcaaaaatcctcaataaaatactggcacaccgaatccagcagcacatcaaaaagcttatccaccatgatcaagtgggcttcatccctgggatgcaaggctggttcgatatacgcaaatcaataaatgtaatccagcatataaacagaacgaaagacaaaaaccacatgattatctcaatagatgcagaaaaggcctttgacaaaattcaacaacccttcatgctaaaaactctcaataaattaggtattgatgggatgtatctcaaaataataagagctactctatgacaaacccacagccaatatcatactgaatgggcaaaaactggaagcattccctttgaaaactggcacaagacagggatgccctctctcaccactcctattcaacatagtgttggaagttctggtcagggcaatcaggcaggagaaggaaataaagtgtattcaattaggaaaagaggaagtcaaattgtccctgtttgcagatgacatgattgtatatgtagaaaaccccattgtctcagcccaaaatctccttaagctgataagcaatttcagcaaagtctcaggatacaaaatcaatgtacaaaaatcacaagcattcttatacaccaataacagacaaacagagagccaaatcatgagtgaactcccattcacaattgcttcaaagagtataaaatacctaggaatccaacttacaagggatgtgaaggacctcttcaaggataactacaaaccagcgctcaatgaaataaaagaggatacaaacaaatggaagaacattccatgctcatggataggaagaatcaatatcgtgaaaggtaatttatagattcaatgccatccccatcaagctaccaatgactttctttacagaattggaaaaaactactttaaacttcatatggaaccaaaaaagagcccgcatcgccaagtcaatcctaagccaaacgaacaaagctggaggcatcatgctacctgacttcaaactatactacaaggctacagtaacccaaacggcatggtactggtacccaaacagagatatagaccaatggaacagaacagagccctcagaaataacgtcgcatatctgcaagtatctgatctttgacaaacctgagaaaaacaagcaatggggaaaggattccctatttaataaatggtgctgggaaaactggctagccatatgtagaaagctgaaactggatcccttccttacaccttatacaaaaattaattcaagatggattaaagacttaaacgttagacctaaaaccataaaaaccctagaagaaaacctaggcattaccattcaggacataggcatgggcaaggacttcatgtctaaaacaccaaaagcaatggcaacaaaagccaaaattgacaaatgggatctaattaaactaaagagcttctgcacagcaaaagaaactaccatcagagtgaacagacagcctacagaatgggagaaaattttcacaacctactcatctgacaaagggctaatatccagaatctacaatgaactcaaacaaatttacaagaaaaaaacaaccccatcaacaagtgggcgaaggacatgaacagacacttctcaaaagaagacatttatgcagccaaaaaacacatgaaaaaatgctcaccatcactggccatcagaaaaatgcaaatcaaaaccacagtgagataccatctcacatcagttagaatggcaatcattaaaagtcaggaaacaacaggtgctggagaggatgtggagaaataggaacacttttacactgttggtgggactgtaaactagttcaaccattgtggaagtcagtgtggcgattcctcagggatctagaactagaaataccatttgacccagccatcccattactgggtgtatacccaaaggactgtaaatcatgctgctataaagacacatgcacgcgtatgtttattgcagcactatttgcaatagcaaagacttggaaccaacccaaatgtccaacaatgatagactggattaagaaaatgtggcacatatacaccatggaatactatgcagccataaaaaatgatgagttcatgtcctttgtagggacatggatgaaattggaaatcatcattctcagtaaactattgcaaggacaaaaaaccaaacaccgcatgttctcactcataggtgggaattgaacaatgagaacacatggacacaggaaggggaacatcacactctggggactgttgtggggtggggggaggggggagggatagcattaggagatatacctaatgctaaatgacgagtcaatgggtgcagcacaccagcatggcacatgtttacatatgtaactaacctgcacattgtgcacatgtaccctaaaacttaaagtataataataataaaataaaataaaataagacacttcattatgctattgtaattccttttaattactgcattttgacactattgtattaatgtagtactgagaccctaacatactaccaggtatggtctcattagaacattaagactattattttctgatatctgacatctgacatgttgtgctgttggtttttccattagtgcaggctaatggatgagataatttttagttgcaaaaccatagaatacttaacagtcacctaatctttatgtcttcttcttcatcatttctttctaacagaaaatactgtcggaccatgtcttcctcatcttatatgtgtttaattgagtctccaagacacattaattctagttcccaggtttacatacacgtgtcagaagagttacaattggctgggcttggtagctcacgcctgtagtgccagcactgtggaagtccctggctagctgatgatttgagatcagcatgactgacatggtgaaactgtgtctctactaaaaatacaaaaaaaaaattaactgggcatggtggcactgtggctcacgcctgtaatcccagcactttgggaggctgaggggggcggatcgtgagttcaggagagtaagaccatcctggccaacatggtgaaaccccgtctctactaaaaatacaaaaataagctaggcatggtggcacgcacctgtagtcccagctactcgggaggctgaggcagttgagaatcgcttgaacccaggaggcggaggttgcagtgatcacgccactgcactccagcgtggtgacagagtgagactccgtctcaaagcaaacaaacaaaaagatacacaaactcagaaaatggtttccaaaaagctagtttacttgatggtttaaaggtatggggagagtaactagtatttgaatagcttaaataaaaaatgttttgattaactaatgaaacatggtgggctgaagatcttatatcaaagaaaagggtggtggagaccattgttttatttattcattcatttattaagtatttatttgtcaccactttagtgccaggcattgtactcttaaaaaaaaagagagagtgagagagagagagagaaaagaaataggtagagaatctaatttaatccgaggtgtgggaggaggaggagaggattaaaatggaagaaggtaatgtcagcctcctgcaaattcttttctcactctgtaattcttccatatggaggaaaggaaagcagagtgctgaaaggatgaagtaaaatctgcagaattatttcaccattcagcattagatttattaaaaaagcatacaactgaaagttttctaggttgaattactaacttgccttcttagaagaatctggatacttagtttgcctgagggaacaaatatttggaaagggcttccaacttcaggctaagacaagtgagaggagttataagatcattcaatcagaattagtgtataagcaaatgtttagaaaatgctgagaatagttgatgaacagtgaatctttattagctgcttgtttacttttaaatctcagagtaattttaaatattaacattgcttaatgttcagcaatttccaaaaagttaataatttcattgaagtattgtttctttcaaaggtattcagatacatacatgggcatagtcatgcacgcacacactgacaacacagtctttgttcactttgttgccagttggcttttttatatggaatgtagctgggcagtggtgagaggcaggttatccactagtggacaagtgaccataatttaattttgaaaggactgaaaattaattgctgtgagtagcctataaataaaacgacactacttgagtacttgtttgagaataataataatatttgctctaagttttagccatctctttttcagcaatattttttcttcttccttaaactaattggttgtgcgaaaacatgtggttggtaccactgtaaagaaatatgtttgcataatataaatttaatctgaaattaactcttaagaaaatgaaatggaatttacttcacattaattgtgtttaggttagccaataattgtattagagaacattagtacttcaaaatactatcattttgaatgaattgctgtcatatttaacaacattttggagtacatgagttctgcctcatgagtacatcagaaaaaataatcagtaagttttaagtaagacttatttaaatttaaatactaatttaaatgagttacttaagtaagagttacatattgttttaaatacagtgaaatgtaagcaagaatctattcttaaatgaagtcattgttactataatacagagtttttgtcatataaagtttgtgaggagctgggggtaatgtagggtagaacgtggagcaagagtctgtgttggatattggaggccattagaggcctttgcatacttccaggcagggcaggggagaatatcaaaatgatgtttgaagaaaaaattctaattgatgtgttgtacatggggtactaaaggcttatcactgagtaagaaataacatttttggagttagagcaaatataatttccccttctagtttcttacgacagagaaggaaaataatttccttttcacagactatcttctctcctcttcctaaaaacaaaaacaaacaaacaaaaacaagtgtgatattttattgaccagcttacatctaggacaatcataccttttcttccattaccattatgcttgatttagttgggtaatagtcattcttctactctgtgaattgcagtaaatttcttggtagatttatgttaccttaagttgatttttttttcttgtgataatagtcataacaactttaataaaacatagcaatatacagattccctgtattttatcagataatttacttgcttttgcataattagtctgcaaagatttgcttctatttttgcagatggagaatttaagtctcagagaggcttgtaacttccttgtggtccctcagttgataagagacaggggcaggatttgaatgacaaagtatttgactcttcatgatactctaatactgtttaattgtaacctatcttttcttttacaagacacatgtatgtaatacacaaaatttacatccaagagatgtgaaagcatagatttttttctttctgaatccacattttaaatgaatggtgtggtacatgaggttctttcctacacttgggaaatgtatggcactaacgcggaaacatttctaagttagtttgtcacatggggattcaatcaggaataactgtgtgacctttaagaaaattaagattggctgtcagagggaaatttctatcctaccctatgggatagtcttacagagaaagagggtatcactttcaattctcaataaagaatggtaacttattaacctagaacatgtgtttattactgaatatagtcattttaataatgggagaatattctatgatatctttcctatttttaatgtctatttagaactttaatttatcacatacagaaaaacatgatctaaagccttcaaggatctggttcactacatgaatgagtttttaaaatttggagaaattcagaaatcaagaagtacatatataatgataggccaaaggatatcataatttagccacattcgtagttacttaaagacaccaaagaaatactgtaggagtttatgattttaatatcttttggaagatatatgcttaatgtgctttttaataggaaattttgaagcttttcctaaggttgaatataaaatattggttcaagaattatgattgtgcaatgcctaataaaaagaacattctgtgaaaaatgagtagatggtagaggaatgccacctagaagaactttgttagaaactagattagcaggtatctgactaggaccaaggatctcttccccaagtataaaggggccaagaaaattatctcaaagttctgaagattgacacaggcacatttagcccatttaggtcatgagtttgtaaagcttgtgtgtttgatgaagttcaacatttttagaaagctctagcagtttataaaagcaataaaacatttcacctttttaagcatctttgtaggaaaaaaaacttccatatactatcatgacaccgaccctctttgggatgacgttattgcattagtcgatcattatttctccttaaatataacccaggagataaagctgtgaagatagcatgttttataaaagctaaaagttattgtgaattcttctgaatcaataattgaaaagaaactgaagggaaaatttttatatagcagcagtttccaagttattacttttaggaaacttttatactttaaaaagttattgaggcccccaaacagctttactttatatgcattttataattaacattttttagtttagaaatgtttaaaatattaattcactaaaatactactagtctttacccaagaaaatcacaaagataattcacacaaaatttgtacacaaatgttcataatttttcataatagccaaaaaatggaaacaaaccaaaggcccatcagctgatcaatggataaatcaaatgcaatatatccatacaatggaattatttgcccataaaaatgaatgaagtactgatatttattacagtatggataaaccttgaaaacatcatgctaaaagaatacagacacaaaaggtaacatattgtatcattccatttacatgaaatgtccagaataggcaaatccatagaaacagaagtagattagttggtgccagggagtggggatagtggagaatggggattaactgtgtatgggtatagcgtttctttttgggatgttcaaaatatctagaattagatagtggtaatacttttgcaactttgtgaatatatttaaaactgctgaattgtatattttttactttatttttttaaaggtcatcttggcttcagatgaattctgtactttacaatggtgaattttatggtatgtgagttatatctcaattaaaaatataataagcagccaggcgcagtggcttatgcctgtaatcccagcactttgggaggacaaggcgggcggatcacaaggtcaggagttagagaccagcctgaccaaaatggtgaaaccctgtctctcctaaaaatacaaaaattagccgggcgcggtgatgtgtgcttgtaatcccagctactcaggaggctgaggcaggagaattgcttgaacccaggaggcggaggttgcagtgagctgagatcccaccacagcactccagccttggcgacagagcagactccctctcaaaaaaaaaaaaaaaaaagaaaagaaaaatataataagcacattatattttatcctaaattatatatttttatgaaaaacaaatgtgtattccaaagaaaaatattaatgagtagcattgctttacattttctacatacctttttgctgtttggcttcatgagaataattggattctatgtttgcttctacattcaatttattgtaatatattgttttggttgaattatataagaaattctcgccataggcacatatatagttagaaaagagaggagtatcgtaataaattattcagataattatagatatttttctttgatattgtgacaaaatttgttgtgtgatgattcttaaaggttagttgaatgtagaatttcaaatctccaaatagtgctgacttgactgcagttattcaaaggttagactgggctaggaagttgaagatgactgactcacgtggctggcagttggagttgactgtctgctggatggtcagtgttttccttggttatgacctctccatgtgacctgggcttcttacagcctgatgggtggattccaaaatgaaatgttccgtgagaaagtgagaaagttgaagctaagccatcaatgttttaaaggcttgtattcggccattcttggattgctttaaataccggagactgggtaatttaaaaataaaagaggtttaattggctcatggttctgtaggctttgtgggaagcgtggtgctggcactcaacttctagggaggcctcaagaagcttacaatcatggtggaaggcaaaggaggagcaggcgtatcacatggtgaaatggagcaagcaagagagagaagtgtgagggttgctacacacttttaaatgaccagatcacgtgagaactcacaatcacaaagacagcaccaggccatgagggatctgctcccatgttccaaacacttcccactaggccccacctctaacactgggcattacaattcaccatgagatttgggtggggacagatattcaatgtatattgaagcccagcctcagaaatcacagtgtcatgttccctacatcatactggacacaactgtagggtcagcccatatttgaggacagtagaaatagaccctgcttcttgatgggaagagtggcaaataatttgcagctagttccatgatacaaccttttctgacattttgaatgccataggcatgtgggagcttgggatatactatgattaagtattatttttatactattgcaacttctgctttgaaatgaacatcttaactggatgcttttgtttgaattatttaaaatttattgtcaaatgcaataaatttagtgcaatgagaactaagagtgcctcatggcttttgattacctgcccttccttttacatttgtgacattattgttcagtttttaaattatcgttgataattacttaagaacaatttttttcaatatggtataaaaaatggaatattaagtgtccactccaatatcagtctgttgttcttagaatgaacatctccacttcctgtcaatgtttattctccaagagtgccttggttttgcacttacaggttatctatcagcaatagttataagaagatatgctagagattaattcatgtatttacttaattacaatctcctttggaagaaattaaacccacaaaacatgaaataaaaatttgttttttaatgtggagacaaaagggagagcacacaatttttttttttatttttagtagagatggggtttcaccatgttggccaggctgctctcaaactcctgacctcaggtgatctgcctaccttggcataccaaagtgctgggattacaggaatgagccaccatgcccagccatacaaaagagaagaattttttaaaactggctacagtcttcaaattgcttttcctgtatcccaaacttaaagtgctgataaaatgccttttaagttttctgttagtttctccaggaaaggtggtatctgacataggcccaggttggaaatgcttacatgttattaagcatttatgtaatttgggaatttttatcattgtcaaagcatgctagaagcatcattctttcagctgcccttagaagttgcttctagaaatctgctttaaaattgccatgtgaaaggcttatttctgctgtataaaaaataaagctttctttccattgcaaaatggcagtgtctgtagattgttagtagaggtgttgggttggacatgactgctgttactgatcaggataggtaatgcactgtgctttcttaaaagagcaatattagaaaactgcagcttgattgacagctcagcatactgaaaatcttaatgctaaatttgtttaaaaatatttggtggaaagacattataaaacttaaaactcagggttcaaaatttctccagaatatttttgtctactctaagtatttgtagtaccaaagcataattggtcaccattgccatttgaaacagcaaattaccttagtgtggtataatggtgtccctctgaaaccctctggatattttagccacatctgaaaactcagcatgtggattttaaatattcttgagaggaagatagaattctgaggcataattttagctgaatttgtattggtaactaaactctcattaagatgggttgccagattagatctgagctagggtgtagctgccacacctttgtaccgtgtgtagcacaaagaggtgcagcccttgtgatcacagagtgttctaaattgcataatactttctaaaggcctgtagcaatctcagtgcatttcttaaattctatgagtgccccccatttactttgattttatgttggcctaactagatggtttgtttctctgtttagttttggttgctggtttattttggagagttcacacttcactgggaaagttttaagttttcttgtatagaaataacttggtaatgttacattattagacattattataacaaactcttgattatatggcatcagataagcttgtttatggattgattgtaaaaactctgaaaaatgtaaattcttagaagtcatcaaaaaataaacacattaaaataaatctgttatttggaactctatagtaaccaacaaagcccagattctctctattgcacagttggcacactctttccccctcagaaaggaaagaaaaaaatacaggtttagtatctcttatctggaatgcttggaaccagagtgtttcagatttgggattttttctgattttggaatatctggttatacataatgagatatcttggggatgagacccaagtctaaacacttaattcatctctattttatacatactttgtaaccataacttgaaggtaattttatacaatattttaaataattttgtgcatgaaacaatatattgaaccatcagaaagcaagggcgtcaggcatcgaattttccacttgtgatgtcatgttggtcacaacaaaaagtttcgaattttggagcatttcagatttttagatttttggattagggctgcttaacctgtatattggaaaggaaccctattcagttattttgtagtgttaacttttgagttaataagtctcctctattaggatgatttcttttaacttgatcataagcatgcctcttaaatggagagtaaaaaacaataaaaaaaactaaacttagaaaaaaaaaaaacttgaggacttttcttcctccctttttcctccatctccagtccctcactttatgggaaggttgtatcatggtttttgggtatggataactttattaacccaccattggtagaatatgcactggagtggtaatagattgtgttgagaccattaacaattatattttctcattcagtccctctcccacaactaccagtgatagttgttgatgtgattagtgacctctatggtcctgctacagttatgtatatctttgtacaaagctgactgtatactgggatggaactttgggatagtgactttgttattatcttgtcactgatgttagaaatagggacagactctgcagccaaaaaaaaaaaaaagtgaaacacaattctgtagaaatggaattttctacacaggaacactgttaggaggtttttcttatatgttcactagcattttgggagtcaattcattatttttgtagaacaggagcgtgaaccacagagggaagaaaaataaacccaattgattccaagaatttaaaaattactatcaacattataatagttttaaaaattgcatagctattctgatgtcttctagcaattaatgccaccaaacttatgggagaagtctttttttctctctcagaagtatgctgtttttagcatttctgtgctttagtttttcattagtttcaagtactttttcctctttataaagtatgctgttttacatgagcttttctataaaaataaacataagcaaaaactacaatgggtttttgttataatagctggctattctactcatattctctctaagattcttgagttgctttaagccaacaaccgaaatccattattagaatgttccccctgccaggtttttattactaatacattgtttatttttaatcatcttttgaattattgactattttatggtgtctcataatagcaatttctatttgttttatgtacttcatagagtagattttgtttttctgcctcactccattatatataatggcttagctttgaaatctttgcttgatatagaggatgttaatttgctttaacacattactatctaaaatagctcaggttttgtatggtcttgtaaaagctttatctcgaaatgctctgaaagatgctttattttttactctctatttaaaaaagaagtttaaatttcctcctgatattcttgtctcatgccaggatattaagcagatgctcagattggctcagctaggtgatattaaaatgtatagattcagatttcaaagcaattaataactttcactctgacattattcttccaatattttattcctactccatgacctaagtcttctaacggttgttttgctacttaatctctagctaattatttcttttctcctcatcctgactgcattgagtgataggtctgttttctgtaggcttgcctgcatttcttaactgaacccctagagtactgtgtcctatcctactctcttcaattcttccccaatgaggcatgaccaagagattgttgtatccttaagaggcaaattcttagaatggagtggcagatggatatataagaatcaccagtgcagtgataatggaaattcaacttcaattagattttaaagttggttgcctccaaaaagtctagaagtgaattgaatagagctatttgccctattaggattttgttccttgctaccaagttgtcaggggaggtgattacaaaattggaggaatccatgattaggaaatgatgatgatgatgatgatgatgatgatgatcatggtgatgatgatcattgcagcctacgtttatcaaaacttattatatatttggcactgagttaattaagccttttatgcactattttgagcatctgttggttgtgcttaatattaataaactagttttctattactatgtaataaattaccacaaacttaggggcttaatacaacccacattcattatcttagtttctgtgggtcagaagtctgggcacaactcagttgagtcttctgtttaggttcccacaaggctgcaatcaaggtttgagccagggctagattctcatttacaggctcaacttagaaaggatctgctttcttggtcttctggtttttggcagtattaagtttcttgtgattgttggactgagagctttattttttgttgactgctagccagaggctaccctcggctcttagagatcaccctcagttccttgacatgtggcattttccagcatggctgcttggttcctcccagccatccctgggagagagaaatattcctgaaggacagatgttacaatcttatataatgtaatcatgtacactgatcatcaacaatctatcatcttttccatattctattgcttagaaataagtcataggtcccacccctacttaagaggaaaggattatacaaggtgtgaccacagggaggtaggaatcaggggcattaccttagataaggtacaccctacaaggtagggtgtaccttgtacaccaccaagagattgctatttgtcttccaatatctttccttcttcttccccacctgagaaatagaactactaattcattattagttaaatatatggtcacctggaatacagagtttattccctagtttccctcgtagctaggtatggccattgtgagtaagtgtggcagaggagtaagataaaagagtctaggactctgaggattttgtgaagttactctatcagttttttgaagattctttactcctgacttctttcaggtgagagaaaaataaacttttattttgcttaagccattgttatttttggctgtcccttgtaggacacctcctttagaccctcctctgctggccagccccagaacagggtgtcttatcctggtcctgcccaagtgtgatcaccctgtgggacaggagctggtctcttcagcccagcctctccatgaggaaaagttcacttcttaacaccatgggaggtgaacccaatcttaactttgttcttttctgtcatctcttctcccctttcctcttttcaagagcccttcatttccattttgtagtgtgtgtgtttttcaaggaacttgaaatcaccccaggtccaggtttaaaccaaccaggacattctgttctctgactcagtggtgaaagcatgacatatgccagtctaatcagagtgaatcttaaaacatttactgagaaatcgtggcaatacttgtatgtagtgatagttctgagtaaccatattttccatgccagccgccaattctgtcctaaggagaaacagactttacctgacccttgagcctgttgcttgacagagatggctcatgggacatataaacaacccagctacttccttatattaaccaatatttagggggtagtctaggggaagcttccacaccagccctgaggttagaaatagcatgtaagggaggactcagagaattgctctgtctccttgactgcaacagtattagtcatggctgactcaggtagaactgggggactctattcagtacagatcttagagaccattgtgtgagtactaagatttggtgtccctgtgcttgtggattcatgcagatgtcacaggatattggaatgctaaagtgattcatcccgttcaagtaacagatccttcctaaattgtctatcagtctccacacctataatcttgaatttattattactttaaaaaattacaaaagtaacccttgctcactgtagtaaattgaacaatacaaaggtgtggcctctgtgtaaaacagatgcttgctttctcaggaagtcttctgcccttcagtgttcctttcacatactccttttagccttacattgataaaatgtttactttttaaaaactaacattgattcaatgcttctcatagtctgtttgtttgtttttgtttttgagacagagtcttgctgtgtcacccaggctgctggagtacagtggcatgatcgcagcttactgcagccttgttctcctgggctaaggtgaacctcccacctcagcctcccaggttgctgggactataggcgcatgccactatgcctggctaatttctgcatttttggtagagacagggtctcactatgttgcccagtctggtcttgaactcctgggctcaagtgatctaccagccttgcctcccaaagtggtgggattacaggtgtgtgccaccatgcctgactctgcttttcctgttcaatatttcaatgattacagggttttaaaatatttttgacctaaacaaataataatttattaattccaaaatagataaagttgtcagcattctggagataaaatcaaagtaaggattcactagtttttccccagtaggaacttaacagttaagttagggcatgaaacgtttaaataagtcaaacagtgagggagaaggtgctaatcatgcactaaagaaagtgaaaaggaaagtgcatctgtttttggtttggcagttaccaccacagctgttttctagtgctgtatgtataaaaagagaaggcaatgatttggaatggtcattacctgggtaacaaaataatctgtacaccaaacccctgtgacgtgcagtttacctatacagcaaatctgcacatatacttctcaacctaaaatgaaagttaaaaaaattaaaagatagatacatagtataaaaaagaagtttcttaaaggagagatgggactgaagttgggtcttacaccaaacaagggaggacagagagaattggggctgctttaagaatcttggcccaaaacagagcagctgtcctcagacctacctgagcacccaggccacagccaacctcagatcaaaagggatggaatctcaggagactgaccaaggtagctgtatttttttttttttttttttgagatggagttttgcttttgctgcccaggctggagtgcaatggcacaatttcggctcaccacaacctctgcctcctgggttcaggcaattctcctgcctcagcctcccaagtaactgggattagaggcatgtgccaccacacctggctaattttgtatttttagtatacacagggtttctccatgttggtcagcctggtctcgaactcccgacctcagttgatccacccgcctcagcctcccagagtgctgggattacaggcgtgagccactgcgcccagctggtagctgtatttttaacatgctctttagataatttcgtctgaagactggcatttaggagtttctaaagcaggtgtgtcttgttattaaataagcacagctgcttgaaaattagtttgggaacataatttatgactaaaagtctttccaaaaaatcaaacaaatggtcatgttcatattagttgatatatttgttattccttaaagacatggttttgtacatgagttgctattctcttaattcttaagattctgtggaatcatttatttgtacaagttgtaccaaaaaggaaaacaagagtccacagaaataacttttttatcattgattgattcattctccatttatttgtttattcctctgacaaatattagataagactagagtcaaaaaggatagaaattagaacaggacattcatccagtcctagggaattttagtagagattatgtgaattaaacacaaattaatgtaaggaaaagtgccagagaagggagggattacttttagctgtgggaatttgagaatccttttagaaacattttgagcttgagatttggacataaatgtgtgtaaaatttgagtatttggacacaggtaaaagatgttccagacagaagatacagtgttaacaaaagcctctgcatgggaaatccgtggcttcccaatagaggaggttgtgctctttgttttgccttaagtgcaagatgtgtggtgaatgagagtgatatgagtttgcaaatttgataagtattatgtatttgccataaaaaagttgaaactgtggctcatgttttcatgatcaacaagttgaaaatcttgaagggcagaaagtagtagcagtagtgagctgccacctttatatgccttcacatttgtccacaccctgttaacattccacatgtaagtactgaaaaagtactgcactgactgtttctgcagaaagcaccacttaataccctgaataaagcttgtctctcatattttaggaatgtacttttaatgcttaagaattactttatttttctccttacctattacgtatcttaggttggattccctagaaatagaccctaaaatggcaatttttaggcaagtggttcactaaaggagtgctctcaagagagtcctgtaagacagtgaggaaagcagaatagcacagggaggaaagctaagcaaaggtgtagttttccctgaagtctagccttcatctgattccaatgggagctgtgaagcacgaatagcatctcagaattgtaggacctacaggcatcttgtattcttcccttttatcactcattcattgcctaaagctatccctggagggagggcataacctcccaacttttcccagaaaggcaactgaagacaattctctgtagaagggtacagctcttactagccaacactcatacagctagaagatgaagcactacaggtaaagggcagtggttctcacctgggggtaattttgtccttgggagacacttaccaatgtctgaagatatttttaattaatgtgactcggggttgggtggaggtggtgttgccactggcagctagtgggtagaggccaaggatgctgctgaacatatgcagaagaacttttctacaacaaagaattatgcagtccaattgtcagtagtgctaaggttgagaaaccctgggtaaagggagtctgagtaggacatcaacagtgactgctgcacctttctttttatgtatgccctgggctatatttgtaaactgcagtagcaggagccattcttaagtattgaccagatcaggtgaaaaaaactaaaagctcattcattcattcatgctttttgttttgttttgttttgagatggagtctcactcttgtcgcccaggctggagtgcagaggtgtgatctcggctcactgcaacctccgcctcccaggttcaaacgattctcctgccttagcctcttgagtagctgggattacaggtgcctgccaccacgcccagctaatttttgtacttttagtagagatggggttttgccatgttagtgaggctggtcttgaactcctgacctcaggtgatccgcctgccttggcctcccaaagtgctgggattacaggcatgagccacagcgcctggcctcattcatgcatttattcaggagatgtttcattaggtaattaaagaacacctgctatgtgccaggcactaggctaagcagtggggatacagagagatagtatccgctcttgggaagctcagaaaattaagaactaagagacatcataacccagtgactttgtcaagtttaaaagagagaatatatattaacacaatttgtacaaacttaaacataaatattcaatcatttacccaacaaatattattgagcacctactagataccatatgctattctaggcactggagatatagcagtgaacaatagggaaaaagtctttgccatcaagtagtatataatccaatgggagaaacagctaacaaacactcaaataaatatgtaataacaatttagataaagataagtgctttgaagaactcagaagaaaaaagtagaatagagagtgaattgaggcaggggctgtgggtgccttatattagtaagaatgatcagaaaaagcctctttaaagagatgacagttcaggtgagaccttaatgacgagaaggagttagccatgtgaagatctgggggaaaaagatctatttcaagaagatgcttggcttcatggagaaaccaaaactgttgctagatgtgcgggctggggagtggtaaggtgtgagttcagagaggtgagcagggactgcatcgtggaagcccactagaccactgtaaagagtgtggactttattcttattgcagtgggaagccattggaggtttttaaggcagcattttggcagatgtgtgatagtccagcaaagagatccaatggaggaaaatgatcaccaagaaggacattatgtgcttgccagctgagtctttgacccttcccaaagtgcattatagagtgtctttccattttatttcataactcactttcctaggtaaaatatctgccattggaagagtatgaaaatatagacataaatttaacattacaccttttccagcagcattgcattatttcaaaaatggtgaatgaatattaggtttgagttttaaagggcagtgaatcatttgttatgcccaagtcccaaatcgggacacatcactagaaagaggaagcccatcagattaatgaggaaagttagatattaggtacctaaactgtatttggtgtagtgtttcaaccaaaccaaatcacttttaacctttttatgtatgtaagtcctcattttgacagatgtagcagcataggctgaacaattattgaataatgtatttctagttagtttgggtgtatgcatgtgtgtgtgttcatgcatgtgtgtgtgttcatgcatgtgtgtatagcacagtgactagaggattgaatttctgttaggggataaataaaaagcctactagatgaatagtttgtagaatgatttttgagagctgcttggaacccagagtttacagcctaattacaatcttctgacagacctttagtgagcagtaatcatgaggataggcttgacttgagtttgaatggtactgttgtttattctgctgttcacagagagcagcatataaaatggattattttgtgtgttagtattcttttatgtgttagtagctaatgacatttttgatacattaataggaagcttgccagaagcccaaaggagcttgaatattttgtaggcaagtaatttatttaaaaattagctacggcataacgtgtatatcatagaagcaaacaacattattccactagtaaagagtaggcattgagatgctcttttgatagaatccttttttaagaagtattttcagagctcataaattataaatttggcaaatatggagctcttttaagttgatttttaaagtgaaccatatgtttagcaggatttctaattgctgtaaatgtccattgatgaataaaaatgagtaagcaagttttcttttttaccatacctggcaattttattaatgtcttacctaactgtaaactcaatagtagctgtttctgacacagaagtgtcagaaacactacttctgtgtcagaaacagccagtcagtggcttcccactgactcatcatccaacttagtaattatcaattcatggccaatgtatatacccatgcaatttcacccttaactatatttttgaagcaaatcccagaaattatatcacttagttcataaattaatagaacctctaaaagataagaattgggtttgtgtgtgcacgtgtgtgtttttactatcacaataccatttaaattcagcttggaaacactctttattactcttggggaagttaggaaaacgacttgtacttctttccatgaaggtttaactgctgccagaatttctttcctgtaataaaaaactagaaaatcaaacacaaaatatgtaacaactgttttcagatagcagacaacaggcaatgtaggactgtgagacctgagaggagggaaatcaataaggccggcccaacaattgtcccagcttcctctctgaggctgatttcaggccaaggggcaggaaggagaactgaaacagagcccagccaactcactgaattgaggaggcggagactggagttaggggaaacccactgggatttgcaagacagaatatcattaggaggggactgtgtgggggggctggggggagtggtaatacctggtgctaccattctgtaccttgctctttttaacttaacaatgtatttatttattatttaaatgttatttgtagagtttccaatatgtgcccaccctgttctagatgttgtggatgcagcctgccttctgatgtattgtcatctcacaagcagtagttccagatttcagtccaactaggaagacactgtgcgactgagtctagcactaagtttactctatagaggataaaacttttattgcacatgttactgtctcctagaacattagctttcaatattcaagaattgtagaaactcattaggtatgctgagctctggtcccaagtcagaacagaattttgaggtactattcttggcctgtcaattactcaggctgattctacttgcacatcaatagagtagtttcataatctactgtgattcaatctgttggaatcgtctatctatatggaaacctagctagaaggacatgtaaataaccatgcattttctcatcataaagccaggaccatgcttattgtagtttcagttgcagaactattttgcagccatgcccatagactatgagtcagtttgaacaaattatcatatttataagcttgctataattaatacttaggatacaatgaccttgggaaaattcgatatcatctgctacatgtgaagatatgaatatctaaagattcagcaattctatccctagatgtgtacccaacatatttatatgtgtgcatgtgcatttagagacatgtacaagaagttcatggctgcattattcataatagctcaaaacttaaaactacccaagtgtccatcagcaacaaatacataaatatattttggtaaatcatgtaatggaacagtacacagcagtgaaaatgaagaaactacgtgtatacataacttatgtgaatcacacaaatgtaatgtttgcgtgaaagaagccacacatgaaaatatgcatggtgggtgattccatttgagtaaagttcaaatacaggcaacattaaagtatagcttgaagagatgcaaatttaggtaaactattaagcaaagcaagtaaataattaccgtaaaaatggggattggaattacttttggtcaaagattgtaattacaaagcagtgtgtgctgcacttccgggagtgcttgcagtgttctttgccttcacctgggtggtggtgtaaaagtattcattctaaaataattgatagttttatatacctatacacatatttcattttattgtccttcactttattatacttcacagttactatacttgttgcaaattcaaggctgatggcaaccctgcatcaagtaagtctattggtgccattttctgaacagtatgtctttccttgtgtctttctgtcacattttggtaattctcacaatatttcaaactttttcattattattatatctcttatggtgatctgtggttagtgatctttaatgttactattgtaactgttacaaattgccgtgaactgagcacatataagatggcaaacttaatcaataaatgtgtgtgtttcttcttactgctccactgactggctgtttccccatctctgtccctttcctctggcttccctcttccctgagacacaacaatattaaaattaggccaattaataaccctgcaatggcctctagatgttcaaataaaaggaagagtcctatgtctctcacttaaaatcaaaagctagacatgattaaccttagtgagaaagccatgtcaaaagccaagataggccgaaagtgaggcctcttgtgccatacagttagccaagttgggaatgcaaaagaaaatttcttgaaggaaattaaatgtgctactccagtgaacacatgaatgataagaaaggaaaacagctttactgctaatgtggagaaagtttgagtggtctggaaagaagaccactagccacaacattcccttaagctgaagcctaatacagcataaagctacaactcttcagttctagaaaggcagagagaggtgaggaagttgcagaagaaaagttggaagctagcagaggttggttcctgaggtttatggaaagaagccatttccataacataaaagcacaaggtaaagcagccagtgtcgttgtagaaactgctgcaagttatcaagaagatctagctaagaccactgatgaaggccactaacactaaacaacaggttttcagtgaagatgagctagccttctattggaagaagctgccatctaggactttcatagagaggggaagtcaatgcctgccttcaaagcttcaaaggacaggctgactttcttgttaggggctaatgcagtgggtagctttcagtttaagtcagtgctcatttaccattctgaatatcctagtgctaataagaattatgcttactctacccttcctgtgctctgtaaatggaagaatgaagcctggatgatagcacatctgtttacagcaggttttctgcatattttaagtcctctattgagacctactcctgagaaagaaagattattttcaaaatattactgctcattgacaatgcacctagtcacccaagaactttgatggagatgtgcgagaagattaatgctgttttcacacctgctaatacaacatccattctgcagtctatgtatcaaggagtaatttctagtcttcgtatataagaagtgcatttttctggctgggtgtggtggctcacgcctgtaatcccagcactttgggaggctgaggcggctggatcacctgaggtcaggagttcgagaccagcctggccaacatggtgaaactccatctctactaaaaatacaaaaattagctggatgtggtggtgggtgtctgtaatcctagctactcaggaggctgaggcaggagaatcacttgaacccgggaggcggaggttgcagtgacccaagattgcgccattgcactccagcctgggtgacaagagcaaaactccacctcaaaaaaaaaaaaaaagaagtgaatttttcttaagactactgctgccatagatagtgtttcctctgatggatctgagcaaagtcaattgaaaactttgtagagaaaggagtcaccattctagataagaacatttgtgactcatgggaggaggtctgagtatcaacatgaacaggaatttggaagacattaattccaacccttatggatgactttgaagagctcaagatttcaggggagaaagtcactgaagatatggtggaaatagcaggagaactagaactagaagtgtatcctgaagatgtgactgaattgctgtaatattatgataaaacgtacatggatgaagagttgctccttatggataagcaaagaaagtggtttcttgagatagaatctactcctggtgaagatgctgtgaacattgttgaaataacaataaagtatttaaaatattatataaacttagttgataaaacagtcgcagggtttgagaggactctagttttgaaagaagttttacagtgggtgaaatgctatcaaacagcatcacatactacagagataccttctgtgaaaggaggagtcaattaatacagacaatttcattgttgtcttattttaagaaattgccacagccaccccagcctgaaattgatgcaagaccctccacctgcaataagattatgagttgccgaagtctcagacatttattggcatttttagcaataaagtattttttaattgagatatatacatattttaaagatataaggcatattgcatgcctaatatacctcaatgtagtataaacgttaacttttatatgtactgggaaaccagaaacgtgacccactttattggcatattctctttatgggtgaggagttgcttcttatggatgagcaaaaaagggtagtttcttgagatagaatctactctttgtgaagatgctgtgaacattgttgaaataacaacaaaatatttagaatattatatacacttagttgataaagcagtggtagggtttgagaggacttttggtggtctagaaccgaacctgcaatgtctctgaggtatgcctgtacatgggaattattttttaaataaaacttaaaaacaaaccctgaccataactacttaacctgggaattttctgaatattaatatttgcaaagtacctttcagtgtagaagggataagattacttgtggaatcctctgaacagaaagaagaggcatctgacccaagatttaatttcttacatagtgaaggacttccttttgatatatacagagaaagaccagttaattgagattctcgtattctaaatttcacattttttttctgtgttagactcctgtatttattccaagaagctcgatagaataatttaggattgtaatgtcacatgcaggtgcaatgtgacatttctgagtcatgccttggagctgacagtacaacttttccccacccccatccatagctttttacctgtttctaaggttttctaaatcataaagatgaggctactgatagtttgagtgaggcttatcaaatcctgtagcttattacatggaagagatggatttcacctagaagtaaaactttcgtttactgataatgataacagctaatgtctgttacaacatcgctacctcagagattttattatgtatcacacattcttttatgtgcatacttgcattagctcatgtgaatctcacaactattcacaagtattatttccattttagtagtgaggaaactgagacccagaggagtgccttgaaaatagatgtgtttgactccaaagcccatgctctttattgctgggatactttataatgctttcgtttagttcagggtcgcaaaagaaacaaagctcttgggtttttgttgttgttgttgttgtcgttaatggtacatttatttcaagtggaaactttagaaaattgacaagcttttcactcatgtctcactgatgtcttccatgtgcctttgagtcttccttggccagtcacttatgtttttaagtaggattcagaatcagaggtggtcacaccacctacctcaaaggctgattcagcttcggactacatttttggactaatgtttaagactcagctgggccaggctcagagtccatcctgtgttttccacatctgatttcttacatagtgaaggacttgcttttgatatatacctagaagcagccattgaataaaagaccttggatgtaatgcaagagaatggggcaagcagaggaaatagttgaaagtttgtagtgagccatcattgtcacattagacctttgtttaaaaaatgtatccattgttaatatttctacttttacctaaagttaggtgacagttataaggaaaagctgtggccgtcttaataatagctaagatatattgagcacttagtatgttccaagaactgttacaagactttttacctattaatgtagttaacactcgccacgatcctatcaggtatgtattcttaattctcctcattttcagaaatggagttggaagcacagagcagttcctaatttacctgagatcacacacctagtaggtggtagacttaggagttactcaggaaggctaattctagaacccacacatttaaccactatgtcatgctgcctcttcttgagttgaagaaagatttgcatgtgaatatactttatatttttaaaaaaatgaaaggtgccatggcatctcaggtgggaaaaaataaagaaaaaataaaaaatgaaaggatatcaagtgttggtggcatattgaatcctttgatttatttcaacataaactatctgcactggtagaaagacatttatagtttggtcgccttataggttataaggcaataaacctcatactgtaagtttataagactgccaagcattttccaaactcctttcatgtctatgaaccactgaacaacaaagatcaagtatgaaaaaatgttcttttgaatttccctaaagcaagaacatactgaaatgaatggtgaatagttggttccttgtcattccttgatcaaataatgaccttcgtgtctattgattctcacttttcttttgaaaatagagtgtttttattctaccaatgatttaaactagaaaattattattgctgtccccttaaagcattacattttttttaactaaaatgtcttgatgttattgatttaacctgtttccctcttttgaaatagctgtgtagtcctcttaatgtatacaacatagatttctggaaagcaattcatatatacttataaaatatgaattctattttaattcagatcttttatgcataactactgtgaaatctgtaagttctcttgatttcctttctttggattaaatctttttcttataaaaatgtagaaaacaaattttacctttattaggatagatagaactatgtacagaaagtacagtatatagttttctgttgctatataattactacagaattactgtcttaaaacaacatgcatttattatctcaaagttctgtagatcagaagtgtagctggcttctctgctcagagtttcacaagactgaaatctagatatcatcatgctgggcttttatctggagtctctggagaaaaatctgcttccaggagcattcagattattggcagaattgagttccttgtggttgttggactgtactccctgttttcttgctgactgtcagcagagagccgcctttagcgtcatgcagccctctccatcttcaaaggcagcaatgacttattaaatcctttttaggcttggatattctctgacttcactttcactcacattcaaagggaggatgttataaaagagtgaaaatcattggaagtcattcttagaattctgcctaccacagagaggtagcaaagtatttatgagtttggtacttccttgagatttgatattgacaaagcctgaaataggcgacttgctttacatgagtgattttaatgtccttatacctattgatttttcaaagggagtacagcacttttaaatttattattattcttgcttatgttagaattcagacttggaagtgttttttttgttgttgttttttttttagacggagtttcactctgtcaccaggctgcagtgcagtggcgcgatcttggctcactgcaacctccgcctgccaggttcaaatgattctgtttcagcctcttgagtagctgggattacaggcgcgcgccaccatgcctggttaattttttgtatctttagtagagatggggtttcaccatgttggccaggctgctcttgaactcctaacctcatgacccacccgcctcggactccccaagtgctgggactacaggtgtgagccaccgtgcctggccggaagttatttttaaagtggtgaaagtataaaattattttgcattcactgaaagattgttaaacattcgtaaagaaggtggtcttctaaccctgattccaaagttccttcctctgatgtcagtggagaggtggagccacttactatggcttatatttatggtaaaggcagaacatgttgagaatgaactgaatttcacagagaacttatcttttcaattttcttgctttagggtcacatagctttgctatgcggcattttttcaatgaaactgaccaccagccatttcttataggaaatgcacaaggcctcaggcagcaagcaacagctgaggggatcagcggatcttttaatctgcctgacgctggccgtagagtccttgcaagcatccaccacgccccagagagcttgttttctgaggtggtagaagggccacatccacagtattcacatcccttagatcctctctctgggaagccacagtggtgataaatgtcgagaagagcagttattctcagggtatatgacctcacagccaccacagctcatctctgctttatttggctttcattcattgaagagacagattttgagcaggaagtacatcttgcaagtactgtctaattactgattaccctctttctgactccaccatgtgagaagcccttcagctgacccgtttcctttataactagtacttaatatgcatcagatttgtgcctttttaagttttatagtcttccagttctgcatagttccaaatatgtctctttagtgaatcaagcctccctgacaccactccctgtgtcttccaacccacagcccccaatgcatttaaaggtacattcagcagaacaaaatttcccaatagagtcatacagtggcttattcatagtgcacactgggggtcttctaatgaaggatagagggcacttgtgtcatggtatcttctatgattcttttgtgtcaaattcaacatctacattagtgcccccttgaaataccatgacctcttagctctacaagtctagtcttttatcatttaccagaatgaacacattttgagtgtctttattattctgtaccactttatttccatgataaagaaatgagaaccccttctttatgtctgagacctttccattctcttactacttacgaatgcaaactttcatgtcatcatacttttcaggtaagaaaatttccattatttctaatagaattgatgtctagattattttaatcatgactacctatccttggacactttatgtttatcagagctctctttcaaaggctcatctgaaccgaacataatattccaaacgtgttctgcccagcccagagcagtctagactgcttcctcccttgatgtgtggattatactttcccaggttcaggtagtatccattctgtcgccagaagacaagttaatgaatgtctaatgaagccaaccagtatttttaaaaagaagtctaagattgccttagaatatttagtagacatactgtgcctctggttcagactgaaattgtggttgactaaactcccccacgctcattttctttggtttgtttatttagatcattatacattgatgaattccacttctccacagctttcagctttaattccttcttgcttcaggttatatccaacagtttattatttcaaaagctctctgttagcctttttaagtactcttatctctgaactcctagtactgggtcaatccagccatctactccacacctaacctcaggctgctgagaactgctgttgaaaaatcacacaccttatttttgtctttgtcttttttatgtttttttttttttggtctgtataaaataagattgattacttttgctagtcagcaccatgatttaaaattttgatttaaacttgattagctgccccatattttcctcctagattgtaagcatgttccttgctctgggactttgcgcttgtgattacctctgtctaatgctcttccactagttgagtaattttcagtcttgactatatattagaatcaatggggactttaaaacagctctgatgctcggccccactccagaccaattaactcagaatttctgaagggtgggacccaggaattagttttgttttaaaagatccccaggtaatgctactgtgcactaaggttaaaagtcactaccctataaagatgcatgctttgccttctcactttaattggttttaagctcaaatgatcaccactttagggaggattttcctgtttatctaaaatatagacctctttcactttctattcccttctcctgccttatttttcttcacagaatgtatcatttatttaccaggtaagctattgttgcttattcatttcatgtgtttgccttcttctcacagaatataaccttcatgagtgcgtacatatatataataatatacacattatgtaatgtattatcaatggtgattagaaccaaaaacacaaaagagtggaagagactgacttggaacagtatatatagagagaagagggcctagaatagaaccccaaggaactaaaacattttgggagcccatgtggtggttactctatttcttgattggtttagttcactgccatagtccaccatctatagtagagcatggcatactattcaacaaagttgttgaaaggagttccccagtacttcaccattttcctcaacctcccaaataaattttctttttcactcttagaatatttttaaattgcagaaaaaaataaaaactgtctaatgaaaattctttaacattctagtccctttgaccaagcttataaagtgcccatgtatcttttttcgtatctcagaaaattgattctcctggtgtttgggggaaagattttgttacatattttttttttgttttgaattcctttattttggatcctgttccattctcttcatcttaagactttgatctattcactctctctcctttattggtgcctttcttcaacgtgagtctacttgtgtttctcccatttaaaactaacattctctcttctgtctctcttgctttctctctctccctgctaaatcctctcatttgtcttatctcttttcatttttaaacctctctatcctctcatttctacccctgatgcttcagcaaaagtgctctgaagtcaataatgatctatttttttccaaatccagtgggcactgttcattattcatctttcttgactttccctctattaagttgggaatgttgttaacttctccttttgaaaattctcttctttcttggtttctgtgatatccctctctcttaagtctgattctacctctaaggtacaatccttggtaagaaagtcatatgtgtcattattcaagttattgataaaaagcttgaaaaaattcaggcttgaggacaggttctgtgttgtgctgttagagacccacgtctaggttgttgctgatcaattttaggggtctgttattcagtctgctgaataacatgattatacagtctgtggatctccatctagtcctggaggatataattaaaaattgttaaatgttttaatgaaattatgataaaatataaatcatacaggattatacctcacagtaacacaaattttaacataaggcaattggcaattgatatttagggggtcttcaagccagcacctcattctcaaacaaggataagctaaaattcctatcttctagggagaggacaagttgtagagggtagcaaaacatcagacagctaggatcttaaaaatagagaggctgagagcaaacaagatcctaatattttctcttttcagtgtccccagattggttgacaaagcaaagatcaattgtatatgaggccattaaattactgcagctatcccaggagtgccagttagccatgacccagcattgtcttcttgtttaattaagctagaggagcaaatgccactatttgataccaaaccatagttggacttgagttgggtgttgattgctgcagctagaacataggtattctatacgcctcaaagtgtgaaccgtggactaaatgtaaacacacacacacacacacacacacacacacacacaattgactgttgagaagaaaaatgaattttattagtcagagagggaggtaaagtacaagtataaaagttatggatgacttactgataattgcttaccataaatttgaaaacttcagcataatctgagaatgagatggcctccatattaatttaataaagttgacattaaacttgaaatattaattcaaaaccaaaagggacctttgtatgtgtggttctgaattttggttggggaatagaaaaggaatctgaatgttgacctaaactcataacatggataggtgagagacagtcacttctttacctttcattttttcttcactatggatttgataaagaacttttgaaattttttttactacattggaggatgttatggacttcattcactttttcttcaagtaaaattttggtaaatattcagttttttaaattggtttgagaaactattgctttggggcaaagtctaaaataacaattgtagatctccttttagagctatgaaatttgaggttaataagttaatgtttcagaggatcataaaacagtaagctgagaagaaaactaagattttccaactttcagaagacactccatttagtaagccctatgttgtcagatgttgcctgtatttctgagtgagaaagaacttttaatattaccaacggtctttgaaatcttttggaaaaaaaagcagacaaattttttctaatttagctttattttgtaattcattttggtaaattattatttgcctccttttctagatttttcttttctagcatttgaattataatctcagaggatgtccttgatagtggaagtatggggttatttgtcatgtcagttgataattactttggatgatcttactgaaagctaaagttgattgtgttcatctgcaaagcaaacaattttgacaattaaggcataaaaattgtgagtgttacatatagctgttccaactataatgtgttgattagagctgtttcatgaatctttctcaggaacagtctgagtgctatatactgcttagaaagaaaatacagagtcagtgtatttgctctcacaatgtgctgattgcggcagcttgcccagagctaaactggctgtaataaaaacttctggattggaacataatgatggcatttatgttatttgcctcctgcactttataaacccaagcaaacagctctcagtttgagaacctcagaaagatctgtcattaggtatggctgagtttccttatgtcgattctttgaagaatatgtcagctgaagtcttgcagtgagcagtagaatatgaatcttacgtagctgaaggtgctagattaaaacagcttccatcttctgactttgtccagatcattttattgaactcagtttgatagatgcctttctgtgagggtgttattatttttaaagactcatagtgagttcctggacctttggatgcatattgccccctaaaatagcatgaaatcaggcaaactggacttattattagcatggtacttaagaaaatttgaaaacagttcaaaggaaaatgactgaacccatcttatacatgcagtatgttttaacaaatcaattgtggattagctctaggaagtggccgtgtttgtgtacatggaaggccacctagatctctgccacatattacagtgtctgttcacaaaattgtccctttttgaattcatagaaccatcactgggaatagcagtgcctctgagtgcctactaaggaacagttgtggagataggccaaagctaaagagagaataggaaagaaaaaataaagatggagggagtgggcaactggagatggaaagggtaaaggatgagtagcagtggttatgtcctgtctcttaataacaatctaatggaagagttggctttcctcttgctgagaaaggatatgcatttttcatatgcatatgccacccttcactgggtttcctgtgtatctttggatcatataccagattaacaggagttcttcattagtaccagtgaagctgttattatcatcacttagccttgctgctgtggacaatccttttgaagatctacatttggaaatggcacgtggaatttcagctcttttataatttatttcttacattattttttaatgaataaaatgaggattacccaagaccgagggacagtatgattcaacctcttcaaggaaaaagtttttaaatggccttactataatattcgaataacttagacccttcacgtaatttccttaaatggaggaatttagtccctagttatgaaaagaatacagtactttctttctagaagactgggaaagtcagaaaagtaaaaagaaaaaagtgcacctataatctcaccactcagaagtaaccagtcaggattagatataatagtcctaaagtgcctttgtattttctaaattcttggggcagtggataactgaaaaacctgaagttttgtgcctgttccctcgggtgatattctaagtaatacctgttatatgttttagtttaactcatgtgtctatggacagtaatatttgaatagctataatgactatgtttaagtctattttattccaaattcacgcatttagccagaaattctctgaccaggagaatagagagaattgcctaatgatttctctattttacctaatgatttcactgtattaactcgtatcttaaacagtaataactatacaaataaacaaaaaaatggacagatacataacttcttgaccacgttggctaatgaaattaataatgaactatgttgaaaactgtaaacatttgctatgctatagtttacaagtgttctccatttagtagaatatcagtgctatttttatgttattgtgctagtatttcctacacaattgttttgcgtgtgtttctactagcatatagattccagactcttcagttttagaagtttcagcatgtatggggtacgtgtgtggtgtgagcatgggggcttgctggaaaggaagttatttcctcttatcttttcttgaaaaaattcagatccatgcttgtgctaattttactcaaactataatttgtttctaaaaactaatgttcagaaggatcaaggaaaagtaatgattataccctttaatttttgtagttaatttatttgaatgttctaaaattgttagcatttttagcccgttaacaatgacagcagtgttgtaaataactgtaacagagctcttgaagaaccagacctcttgattaacaggacccttgatcctacacttaatgaactcctcaggataaaaggtaccataaaattacagtcatgtgctgcataaggacattttgaccaatgatggactacatatacaatcatggtcccataagattataatggagctgaaaaattcctatggccgtcataaggtcatagtgcaacgcagtactcgcgtatttgtggtgatgctggtgtaaacaaacctaccatgctgccaggtgtataaaagtatagcacatacagttatgtacagtacatcatccttgataagaaaaaatgactatcttactagtttatgtatttactatacttttttttatttatttatttttaagttaactgtaaaacagcctcaggcaggtccttcaggaggtattccagaagaaggcattgttgtcataggagatgacagcttcatgcatgttatttagtgggacaggatgtggaggtggaagaaaatgatattggtgatcctgatcctttttaggcctaggctaagatgtttctttgtgacttagtctttaagaaaaaagtttaaaaagtaaaagaaatgagttaatttttttttaaatagaaaaaaacttatagactaaaggtaggaagaaaggaaatatttttgtgccgctgtacaacgcgtttgtgtttaagctaagtgttagtataaaagtcaaaatgttgaaaaaatttaaaagtttataaaatgaaacagttacagtgagctaaggttaatttattattgaagaaagaaaaatatttttaaaatacgtttagtgtagcttaagtgtacagtgtttatacagtctacagttatgtttagtaatgttctaggccttcacattcactcaccacttactgactcacccagagcaacttccagtcctccaagctccatttgtggtaagtgcccgatacaggtgtaccatttaaaaaatcctttatgtcatatttttaatgtaccttttctatgtttagttatgtttagacacacaaataccactgtgttacaattgcttacagtattcagtatagtaacatgcggtacaggtttgcagcctaggagaagtagggtataccatatcctaggtgtgtagtaggctatactatctaggcttgtgtaagtgcactctctggtgtttacacaacaatgaaatggcctagcaatgcattttttgaacatatcctgtggttaagtgacacataactgtatgcatatctttttttgtttgtttttgagactgagttcactccgtcacccaggctggagtgcagtggcgtgatcttggctgactgcaacctctgcctcctgggttcaattgattctcatgcctcagcctcccaagtagctgggattacagatgcccgccaccatgcctgcctaatttttgtatttttagtagagacggggtttcaccatgttggccagactggtgttgaactcctgacctcaaatgatccaccccccatggcctccctaagtgctgggattacaggcgtgagccaccgcacccggcctgtatgcatatctttgttgaggacgttcttcctttctgtttaccactgttaccacccaaattatttcaatttttaagagtaggtttcttttccaattaacctttgtacactgttttgtgaattatactataaaatatgctcaaattgccctcaatcaatatttggtactgataaataataaaatattttctgagtaacaagtcattttcaaaattctcattttcattacataatatttataatacaataattctcttaggtggatgtgactgctagatattcttctccggttctgtgtttgggcacagcttcaactgactcagggattcttagcctgcctagccataagactcccctggaaactgattatgcatacagattccaggcctcacccctccaccccagacctgctcagttacaatctctgggtgacttgtatcatcagacaagtctgagaaacttgaaactagtgaggctgcactgggaatttgatcaatgcgtaattgcatgttggtgtataggaaagatttatggatgtggattgaattgatagtgttcatttacttttatcactagtcaaacatcataagagaaaactgctctcctactttctttaaattttagcttctatgagacttcagttgaggtaatataaaaattattttttgagcactaccatgtacaaagcactattctaatgtttttcatgtatctattactattaatatagagagacgaaataatttgcccagagccaaataagtaacatatgggaaaacttggacttgaacctgagaaatcagatttcagaatctacacaattaacccctgcaatatattgcctatagccaccaaatctaagtatgtattaatgtgtcaggcactactatattaagtacttcatatacttttagtacttttaattcatttaccaattctataaagtgggattacgaaaggcaaattcagagatattaagtattttgcccagagttgccctgctagtaagtggtagaagcagtgtggtttgaaattggggtagctcaactccagaactcttttcacaaccactatcctgtacgccagagtggcatgtttgaaaacactcatacttgtcatcccttcagtattttatataaatagtattagcacctgagtggttttctgtaagctaattatataacacttcattgtctacatttaaaaatgtctacatttaacatctacgttaagacactttggtgtgtacattaaatttttaaagagattctacagtatattatagaattctgtctctgagaaagatttgaatataatatattggtcactctgttatctgtcataggctggctgaaggagagataaggattaacatactttcaaggaattcttaaccctctagtttttatcattaaaggatagtatagttggtgaatacttgcgtattttgtgaacatttggtaagcagttgcacttaatttccttcacttgaacattaaatattccacatttgttctgtcccaagtaagctattctcctttactttgaaatgacttataaatttactttcacacaattattaaagatttactgtaaactgctgctttccccctccttttttttttttttttgtcccaaaatgaaggtgaagtgttaattggttttaatggcatctatggttacctctttgtctgggacttctaaggaaaagcgaagaattggcagaaaaatgtgtgaaatttgtctggggaggtgagaaactttaatgtgcttgtgaattagtgcacttcttctaggtaagactattgcagcataataaatattgaaacggaattctcactcttagacctaatcctttaagtatattagtagacatcatagaagaattttctgaagaaatatgttaactaagtttctgtagctggaaaagatcagcccttgatagactatgaaataagaatgtcttgtgtaaacatacatggacaaccagtgaatagactgtctctctcaagaacaaaggcatgctaatttggattcagaactagaaagaaggagcctggattttgcaacatgctgttatagttaaatacaagactatagttgcctgagacatgtacctggctgttaacactttttcccaataaaagtgattctaataccaagagtggctaattcatctgaaacactgttcctggtgcttatacactgatacattttagtaactctgtgcctttgatttaataggtaaccatctagataagtgttcttatttaacaaaaaaatgtactgggattctggaaagctcaaagaagacttctttaccattttaacagctttaagataactaatcttttttaaaaaattattattccttctgcattttagcagttgacatttccacttgtacctttaccagaaggcagcagagtaatgtaatgagcccagttctgtgttgggggagagagagaaaaatatggctttgttagcatttgcttctgtaaaatcaattcagagtacagtgggacaatagaaatgcaaacaaagtctgttgatttgtttctacacttccctctttttgtcattccatattgaagtgtcggttgtattataagataccaagaaaatgtttttttatcatcaaagacaaaaacaaaattttttggccgtgggcggtggctcacgcctgtaatcccaacactttgggaggccgaggtgggtggatcacctgaggttgggagtgaaagaccagcctgaccaacatggagaaaccccatctctactaaaaatacaaaaatagctgggcaaggtggtgcatgcctgtaatcccagctacttgggaggctgaggcaggagaattgcttgaacctgggaggcggaggttggggtgagctgaggtcacgccattgcactcctgcctgggcaacaagagtgagacttcgtctctaaataaataaataaataaataaataaataaataaaattttttaggcactttgagccattaacccatacccgtgagttaagtcctctacttgaaatacataattttttccacacaattagacaggcattattactaccttattttacagaaggtgaaactgaggcttagaaaagttgaccaaggccatatcccaaataagcagcaaaaactggaaagcaaacctaggtctgtctaattcaaagataatgctcttagtcattatctcaaatatgaattgtatatataatttaatagtgttctggtgtattttgttttatgtacttggagtcagcatgtcacaataaagagcaagatagaaaaggcaggagatctggagtcaagacacttggatttggaatcaacttgtttgttggaattctaattctaccacttatactgtgttatattgggcaagttgctttaactgtttgaactttggtttcttttgtgaactgggaagtaagggagataatggatatgaaatgcttaataaatggtctatgctaatactctacatttgcagagtggcttacggtttacaaagagctttcaccaagattgtctcaggtaatacttagtgatataagtgtttgaagttcattcattcttttattcattcatccaacaaatattttataagtgtccactaggtttcaagcattgttttacaagttggaaagatttagcagtgaaactacagggaaaaaaagactcttgttttcatggagtttgcattttaatgaggcatatagataataacacataagcaaaatattaaatatattagataataacaaaggtagcatttaactcttatatggtaagcactatgagctagtagttagcttaatagctagaagcatattgtgattcatagattagctacatgattttccattatagacaaacaaaacctgtaaagtacttacagttcaactacaaacttaaaaaattgtattgttttaaaacaattaggggatttaaaacaattaaatgttggtacacatcaccaaaattggtgaaatatcttctagctttaacattctatgatatattggctaaaagcatggagtaaatatgtacctcttatacctgtctgtctttatgtaggtctggcaagtgtactctgaatataacataacaataattcacagatttttttaaagattattgaaaaacacaaaataatcttggcatttgttaactttgtaagctagtcagtattctcttgagttgtatgtctcaacttcagcgcaaagctaggaaaaagcttcagtgatctgaaacttccattctcttgtactatggctcttaagaagatgcaatgggatcatgagcagatcttgtagggaacccagacattaaggttatttctgtctaccctgagtttaaattcactgaaagctacaagaaagacaagtgttacttttagggtagttgacagccattgactattgatgactccaagtcatcattcagcatcatggggcagaggtctgtaagtattggaagaaaaagtcacatctccccattaaacgttttgagatttaatcctgaaaatgctttctagttatctcagtaaaaggaaataatctttttttcttgactcaaacattaaaaaatttactgatgaagtatttctggtcagtgtttaagacaagcttgtccaactcatagcccatgggccacaggcagcccaggatggctttgaatgtggcccaacacagatttgtaaacttttttaaaacatgagttttttttgtgatttattttttatttttagctcatcagctatcattagtgttagtgtattttatatgtggctcaagacaattctccttcttccaatgtggtccaggaaagccaaaagattgaacacccctgatgaagaagttaagagcccaagcttcagtaacagaattcttgttctactacttactatttaagaagaaatccattatagcttcaaaatattttgagcatctttccacctctctactcaccaccactattctgttccacacagtgtttctccatacagtagctagagtgaccttattacaattgaaatctgacagtctgatccccacaccttctcctcctcttttacttacttctcctgctctccaccccctatcttccccttattcctccctgccctcttaaaaactgcccgttttctttcttttatgctagaatgaagttcagactccttattcaggcctaccttgctgatctcacctacgtcttgatcactgagtgtaagtcacctgaattcttctaatccttaaacacattaagctgatttcctatttgcaactttaacacagcctgtttcctgtgctcagaacactgttcattttactctttacatggctgactctttatctctcgggtcttaggctttctcttaccacccaatctaagtaggttctcttgttatgctcactcatagcaccatgtttttctctttcatggtacctatcatagtttttcactttatattcctttgagttttgtttaatatctggattcctgggtgggcacggtgactaatgcctgtaatcccagcactttgggaggccaaggcgggtggatcacgaggtcaagagatcaagaccatcctggccaacatggtgaaacccctctactaaaaacacaaaaaattagctgggggtggtggcatgcacctgtagtcccagctacttgggagtctgaggcaggagaatcgcttgaacctgggaggtggaggttgcagtgagtgagccaagattgcgccactgcactccagcctgatgatagagtgagactgtctcaaaaaaaaaaaaaaaaaaaatctggattcctgtcctcccccaaccataatcttcatgtctttttggtctactgctgtacacccaactccagccacagtcattgaacagatactcagtacatcattgttaaggttgaatggataacaaatctctatgacctttcgaagtcttaatttgcttttctgaaaaatagggataataattcctatctctaaagttattgtgtgaattaaatgagattaaaagatctaaaatacttaatgctgggcttgacaaagtcttcaacaaatggtagggtctgtagcagcaacaacgtaatcagcaggcacttattaagcccactgtatgtgtaagacgtcactaatatttatagaacatattttagaaagagaaactttttttagacttttgtttaatctagccttttctgggtatattcattaacattgatccccatattaaggaaattaaaatgcgagtttccagcagtgattccatgctttttaatggaacattgatatgaactagcctcagttttatgttgtcacaattatcagagcccccaacatacattcaacagggtattactttgtgtagtaattgcctagactatcctccctccactccagccagctggcattgaaaaagaagcactgcttttatgtgtgcacgtaatcaatctgtaaaatcccattatccccaacttccacacccccgtggctgcatgcttccttttgaagcctcttaaaaaagaaaaactttgaaggcaaccttgaagtttatttctaatctcattctagccatataacataaaaatgagataggggtagggagtgggaggggttcataatgtgatttgcttacctctttgcctggaatcttatgatacttgtaggtaagcccagtgaaagtttacatgagtaaaaatacttcttcagtgtgtattttgagataaagttggatttaattctgtttcaaagtgtgaagaatagagcaaggttaatgtggttattcttgttcttcttttaatctgttcttaatgtctatactatttagaataagagtttccacccacctcttatgaccagcagcctgtgtaactgattatctgttagagtcctaggtgcaatgcccttcccactctgctttcctgtttcatgtctgtttctttctgagaatattatctcccttctggatcattttctaactgcttttactaggccactgcaatctttttcttttgggttccaatttcccatgtgattggcatttttcttagcattcttcccacagtcttgaagtaattgacgtttttgcttgaggatgacctttcctgtttcctccatctctagaaactaccaacatttgattaaagtagggtaggggagaggtgtgggatgtaggtaggtaatctcaaaaatgttttctccaaacatgaaagatgtgactatgcttctgtcatcattattcaaaaacatttattctgaagtctgtattttatatatgcatcacctaatcccatcatcttctccatcctcttcatctctgggacatttccccatcttccttagagcctgaactacaaaccttaccttcataccaactcattccatctctctcagtgactttgttctcctagctagtgattcttgtaaaactgtagcttctcggtctttatttcaggcatcctagagccacagtcatggcttaggccgcacctcttgggcatctcaactttcttttctcctattaaatattcttcctgtcttcattgtagattcctctcactatactcccatcttcttcctcaggttgatatatctccctcctggtgttcacttcctttttttctatcttgttcctccccatgacccaacaagaccccttcaccctcttaacttcttgaaagagtagtcttaatcattgtttctgttttctttatctcccattatcctgtcagcaccctagaggcttttccctcattactctgcagacgctgctttcataatccccaagggtcacctcatttttcatattcagtggtgacctcttctatgtctttaccctgataacatttttgacatcctccttttttaatactttccttccttgactccataatattttctttctgtgattattttccctcctctgcaatccccccctttttgtttgttgtttctttgatgtggattcttcttcttcccctgctacaaagggtaagttctcctttggcacctcttttctctctgcttattttctgttgattatctcatccgccctctcaatgttaatactcacctcttagatgtggtttcccttcctgatgctgaggatatgtccccacatcctcctttgtaacattctgtagacatgtccagagggataatgtaaacctaaggtcatgttaatttattatctaaactgggtcactgtggagggttgaagagggcactattaataattagcagatgtaaacctgtactgcgcacatagtcacctgttcaaagccaacatttacaaaatactctgaaatctgtttcttctcagttgttttccatctttattaattgcctcaccaacattctacttacctgtgctgaaaatcttcatcatcttcaatattctactttttttactgtatctttttaattaaagctttcttttctttatttcttttttgaccccattccactggcagtgcgctgttcaggcccttatttccccttgcctgaaatactgcatagccgtctaacttgtcttcttgttcccagtttctcccattcatctttaagcaatattttttatttttataaaatgttgcctgaagtgcactgatcatttatatacctgcttaagagtcattgccaaagaatatcaatgcagacttctcagcttggaattcaacacactacaaagcctaatggaaaatatacctttccagtcttacctccttcatggaccctgtatttcagttggactattggcctttatccaaacacctcctaaatcagtggtccttgaccacatcataatcacctttggaatttttttttttttttttttttttttgaaatgtacatgcctagccttcatctgggagcttttaatttagtaagtctttactggggcctaatcagaccccaataaaacctcttaataaaaacctccctcaggtgattctgaccaaggccagggttgagaaacattgcccatttttatttctcgataattttggtcacattttttcttcataaccagtatgtgcttttctttaaattccttcttacccttcaacacctatcctatctccttcatgaggtcttccttgagctattcaaatagatgtagttgtttcttcctttttactgcagagcagtgaacggtcactgctgtttatgcctaataattggtagacagcacacttcttgaaggcaagccatctgctacttataaaaaagaagccagctgggtgtggtggctcacgcttgtaatcccagcactttgggaggctgaggtgggtggatcacttgaggttggaagttggagaccagcctggccaacatggtgaaaccccgtctctactaaaaatacaaaaattagctgggtgtggtgacgcaagtctgtaatcccagctactcgggaggctgaggcaggagaatcgcttgaatccaggaggcacaggttgcagtgagccaagattgtgccactgcactccagcctggataacagagtgatactccatctcaaaaaaaaaaagccagtcagtaaaagtcattgactagttaagaatatttgtagagaactttgaagttcttaaaaagtgattgataagcaggagttattttttgctaatttaacaaaaagtcccaaaacaaaaagtacggtgtttgtaattctaagactatgctaaattaagatttgttaatcatgctaagaaggaaaaaggaattagaattttaaatgctgctaccattttcagcagcaatgaactaatagtacattcattggtggattgattccattaacactcatgcttcagatgctttagggcatgtagctctctttggattcctcatgaaattgtcatgttggcatgtagctataaaatatgcattaatcagaaactgtagttactaaagccaagttcttttcactagtttgtttggaataggggaataatacttttaataaatcggccttcctgtaagatagagcacagtgtcatttttaatagggagcaagaataagtgcagtgattaaatgcagttacaaatggctgcatctaaaaacaatttttgatttttgtcaaacatttagcaagggagtaatttttttcctctagttttttgtagctttcccagtttttttttgttgttgtttttgttaaagttatatgctatatattcagaattggattctttttccctataaatttgttagtacctgatttggaatttagtcttattaatatcatttagtttgggatgcatggaaatgtatgtataattattgagtgccctttaaggtggagacttgtatcttgatattctattgaaatatatatatatatatatatatatattttgtattttgcaaagcaactggattttatagcaagcgtaggtaaagaaaaaacttgtatcctcttggtgctctgtgtatttgctagtataaaacatgtttctgatttattccaggcaacataatcaaaaggtgtattttagaacatacacaaacttttctatgctcatgaaaggtatactgactggaaaatatcaatataatctcttttttttttttttgctttttataaactacaggtttacagagactttatggagacatccagtcctttccctgacttctagcagaactatagcttaaactactcaaaacttctagaagcaaagtcaaacttccttcagaaacattccttatgtttaatgttaatcacattcatcttttaagttgtccctcgaaaacaaccataatgggaagccaaaagacagagtgttgggaaacattttgaagacagcaaacaaataattaataagatttcatagtcacttggagatatctccttgtcagtagaggagtaaaaggagcagtatctagtaaaacttgggaacagatggcaaacatttgttgaccataataatagtagtaacttgtattttgtagaagattatacagtttccatgcacatcgtgtcatttaatcctcacaaaaatgagggtactattaacccccttttacagatatggaaacatagctaggaagggtaagtagtttgtttttaattgcatacctaagtggtagatctgagatttcaagtcttttgatgctctgtgtggaaaacacaaactcaaagtgtgtatgtgtgtttaattctctcattcaacaataatcaacatagaagacttgtcttaacaagttttgccccatacaccacgcaagcaatcagttcttcagcagataccagctgggtgtcctccaattcagtttaatcccaacactgtctacctggaaattgtgtcatatcccacaggttgagggcttattcccacaaaactgcctcctcttcagacaccagttgcaagactagtcagcttcaagtttggtttcccaggatcccctttttgtgttctattaatttgctacaacagctcacaaaatgcaaggaaacagatttactgacgtattataaaggatgttacaaaggatccagatggcaggaaacataaggtgaggtctaggtgggcacagagcttccatgccctctccaggcatgccatcctgcaggaaccaccacatgttcagcaatctggaagctctccaaatcttgaccttttgtttttttatggaggcttgattacataggcatgcttgattaaaccactggtcactggtgatcaacttaatcttcatccacttcgccctctctggaggttagggtttggggttgtaagtcccaaccctataatcatgtcttggtcttttcaatgatcagactttatcttgaagctacctagggcctgccagctatcagtgaactcattagcatatgaaaatatatcactttgaagattgcaaggattttaggagttgtatgccagaaacagggacaaagagaaagtgtgtatttcacagtatcacaaatgccaactcactctactaaaaggctattttaaaaaaacagtttttcaaagaccaccttaaaaagtatcaggacagtggcagcagtgcgcctaagagagaaaggctttgaaaccatttcttaaattttccatctatacagtgtataagtaagaggaaatacatttatacatgaaacactgaactctttgaagtaaaatgatacacaacctcaagatgttgattttttaaaatttttagccaacttttatttttatgcctagaaaaatacatgggacgtttaggactaatgtgctgggcaatttgctacttagtgatagtaacacaatcctgaaaaagcaagcacaattattctgtactttttaaaagttttattcagcaataagaccataatttttcatatttaaggagtatgaaaaatttgtggagttttaaaagctgaatacatgtagcgttggatcaaggcacatacaagactggccaaagggcgtacaatgcactttggttttttgttgaaaaaaaaaaaatcatggcaacagaaaagtgatatggtttttcaacaagtaacagctcacaattcagtaggaagctagaaggaaatgttacattacgagttcattatataatatctggaaaattgtgacagtaatgggcagtattcttgatctttgtaaaagtaaattgaacatttatgtacagtgttaaaacctttgacataaaccagatctaaatttgatgtctagtatttatttttctttaaattatctcttatttaaagaactactttctctggattgttgaggggaatcgcttataattacattacatttttaatatgcataaagtttctctgacatcctttatgataaaaacatcataaacactaacaattttgtgtttataattcacttttcaaaaatcaggatggtataggcaaaaccaaaatgcagttttggtatttgtgttcattacactatacaagtctaagtttccatgttttcctaagtacacattttccccccaacttggaagcacatttacattaccgtttttgtgaagtcctttattttcaaagctttgctgacaatggctttaacagacttcatgctccttttatgccagctgatgtattcagttcagaagatatgcttaacttttttaaggataattaatttgcctagagcaaaaatggagatatgcaggaagtttgatattgcccattacttcacacattttgatttattgaataccactgggataatacaaatttaataattggaacattatttcataaccattttttaaaattaaattttatctcattcagccattcagccagttttttttttttacattttattaataccaaagtgaaaaatggcctgtgcttatactacaaggatctcatatgaatgcagtcctgattgttcgacacagcaagaaaattcactttcacagtcaacaagtcatcttactcagtagaacacaaagtaaatggtttataactccaatatttgcaaggaaaatacagtacaaattactaaaaaatactaaaatatagaattgtgttcaggcatctccactacatcaatcgcagcagtaacctgaaatttgaaacttttaataaaaagttcttaaatataaattatatggcaaatgtacagtacattgctttttttcagtctctttttccagtgttttgcagtagaacagggttcctaccatcacctcccttaggtttaaaaaacccaaaacacaagtctgctgtgagtccttcagcatcatgagtgtgagtgatctgagtctggaataccactgtctctgtagcttcggttactactgctttcactgtgattgtttttgtacagattcattccattaggaggaaatatggtgtgtattacaaactcctccttcgagatgggttcattgcttattggtaacatctgaaaagaagtttccctgatttccaggatagagttgtccttcttagtgccagcttctgcatagtcatcctttcttctcctccctttgctatatgcacagttccttgagaagagcgatccattcctatgaacataccaacacactaaagcaagaagggcaatggtaaccagggccacagccccaccaatgatggcagccaaaggtaaattggggtttttgtaaggttctttctcttgctctcgattgagggtggttgtagggttgtacattcgaaggggtgcagtttcagtctcaatacaaacaggagtttcatcaaataggtagaggttgctggtttccatgggaaccatgcatactttatagggtgaatcaggctccagggctgtgaccaagtactcactgcgttcccctgttacaattgtttctgttatagatccaaatgccgggctatggcccagtttaagccagctgagtctcaaagcagtcataggtagagcaagtttccaagagatatgaatggtatcagaggtgacagacttcacagtaattgtaattgtttttcttgagggactccctgtggtttggtgatccttagtgagcttggggttcttaatatctggctgtttggtcactggagctggccactgtccttgggcaggatacactgtgttgggtattgcagtggttatctgaatggtgcttacaatcccactgtccttacaatcaaacagttctgcattgagatccttaatagccatcccacgaaccttttctggggcttggcacatgagcccacgcacgttgaccttcacaggtagtgattgtaaccagtcacgtacccatttcatcttgcacccgcaataccagggattgttgcgaagaatcagttgtgttatattgtccaaatcatcaaagataccctgaggtaaattacttaggttattattggacatatccagtcgatagagctgccttagataagaaaaagcatttgggggcacccgattgatgtggttatcttgaagataaagcttcctcaggtttgtgcctggaaggtttactggtgcagcagtcagggaattccgcaccagggacagctctgtcaaattaactaggttgaagaaaactttgtcacctaaaccatgattgttcaacaggtttccatctagaaccaggcgttttagactagtgagaccttgaagagatggtgatgaaatagtggatatgcgattatcatccaagcgtagttcttctatagtcctgggcaaaccccagggaattgtgctaaggtgattacgggacaggaaaagcagtcggagatagttgctgtctcggaatgctccctcttctatgctaactgcagagacagagttgtcatctaaatgtaattcttccagatagggaatttttgaaagtgaatcataagtgatagtccttatgttattttcttgcaaatgtaactcttttacatactttgggaggttggtaggaaattcatctaaactgttgtggtataggtatattctttctactttcagcaagtttttcaaatctgaaggaatcccagcattatttatttggttgttctgaaggtagagagttgtagcatcctctggtattcctgttggaatggatgtcagaaagcgatcattacagtaaatgaaacccgcatcgcagcgacacacagatggacaggatttagccataactgatagaggtgctacttgaaggaacagcccaattttagtcccgatgaggaagatgctccaggctgcgctgatcatggtcagcagtgttgaggtctttatacaaggtagcttccgttacttcagaaccctaaaatgaagtgagtaaaaaaagacagaaaacaataaggccagcatactgaatataatgtttaaaaacaaatgtggaaactaaaatatccataatcacttttaatattttcatttgttttgggagggggcataatagggtttattgctagctaacaatagacactgtcatataatctctttaccttaatggtttcttaatttctttataaattaaaaagtatctgtcctaaatccatttgattttgaaatattaaatataattgaagttttattgaataatccaaagtattttaattatactttatatcaacctttagacagtcactgatcaagctaattgaatatccatttcttacttaatattcataataagtaacaccttggaatattatttcttatatttaaaggtaatcattttactgttatcaaaaaaccacacatttttatatttactttttattaggcaaaaactatacaggtgtagaaaaatgtcataaaaatacctattctcttcatactcaggaatagttacacacatcttgagatcctcaatctcaaacccatagtttgctttgattattaatgtcatttcattttctttggttattaattttaagcattattttaaatggatggatttctgcaagaaaataagaatgattccttcatttatttttgggaaagaattacaaagctaatacatccagctaacctaagtggaaaatttcacttcatattaaattctgtctttcttctgttcacattttgttatatgtttcatactgcaggttttaatgactttgtccacatttttcattattttctacctcataacgtgttgtcacagtgcatttatatttctttgaattctaacctagaacataaatcaactttttctatggctggcaaagtatagatttatactgatgtattgtgtaatatagtctcttctgtccttttaagtattaattagcctttgtaattttaggcatgaaaataaaatactttgtttttcctaccttattgaacgatgtgagtaaattttgcgggggtgaatatccaatgcacatatattattttcctggtgagggactgggacttataaacttttgtttagtccttggaaatgttcttcaccgtttattcaagtaatcctatggcgtacacacctccagatcaggcttgctgttgtcaatgaacattccagctgcagttcagcatggtgggcaagctcattaaagtgggggcagaaacaattctgcttcctgttactatgtaggacacatggcttcctatgtattttttttttctttctgatagagtttctgtgtgaaagttccttttgtgtagcttaattcccttagtggaaattgccctctttgaaattcttattggctcttctgtgcaatgtggtcagagatagtaacttcagatcctcatgaagaaagtcattcatgatgctaaggcctgtatagtaataggtttttcaggcagttaccccctacctttattcccatccaggattatccaagtataaactttgtacagtagctacatcctgaggtatgattacctgctgtgaaatagctatttccagcttttgcttcttgctgatttttcagaatgtctggtgcagtcacgttatacaagaacaggtattctcttttaagaagtaaaggaaactaaattcttcatttaaagaaaaggaggcatactaaatttcctttatatttctcttccttaaaatatactgggactgagcatctcctgtgaaagtaaaaggttttaatgaactattaataatgaactttaacatactagagaaatttcctagacatttaatttcaatgtcttaaaataacacatctttcatcatagtggttagtcagaagggataggttgacctctttgtttttagacttctcattttcttatacaaataaagtaggagccaaagttgagattgtcatcaaacagataatttctattatctgattgtgtcactttgaattaaacaccatggctttcaaattcaagccagtctttaaaaatttacttttaaatcatatgcataaaatgataaaatgtttaaaaagaagaaaacaagtacatgtcaaagaggtgagcaaatacattaacaaatatttttgacagaaatgccaaggtaactttttaggcatttctgaacatgatttaacaaagtcacacaatccacaatttagagttgaaaagactattttaaaagcttttcttttgatttgcttagtgccctgtttgattcctcctgcaggtctcaattctcccaactgcagaatgttgacatcatcccctttctctttaggggtgtatctaaggactacttagtgatcttgaaactctaagcactcaggtgttcttgcccaaaaggtgacatagaagttcaagtcatatttagtttttctggagaatactgttctaattttcttttagcatactgagtttgaaaaaaaaattgtatttgaaatagaagggacactattatttcaatctccttgtagtgaccattaggaaagcacatcaaaaccaggtggggcatttctctctaggttcatacatgaatattgccagtttttaataagtgtatttttcatttccaaaagaagacttttggcttgactaaagagatcattgaatttaatgttgactgctttgcccattatcaaatatgcacgaagattttttgagagtttagaggaggtgagtaatattcgaattggttatgcagggtcatccactctgatactttgtatatatgtagggaacatttgagtatcctggaaatatgtgaccctcaaagtaaggactaaagtagtagcaatttgcttctcccacagttgctatctaacatccaacaagtatagcatctgttccataattcagatactctgctgaacgagtatgttaaataaggccacaatttgtgtttctggttctctccaaaaattcagtttcttttagtttgctaactacataccaacatggtcataggctatattaacggaagaaaagtgaaaacaattacagatacatataatttattatttacgcaacttgaaacaaaaatagcagttagcagatggatcaaacagtctctagtgaatattgcaaagtgcccacagaggaaagtttaaatgatttattgtttaatgtgaggttttactgtgatgcctttagggctttgctcattattgtcaaattccaatagtatcttttcttgaaaactgttgctttctcagtgtgtgaaaatggaaaaccaagctgctgaaattataattacaaagttactttttaaagtatcttctgtaaaagttttttaaacttgaaaattattcaacatataaaataatgtggttaatttaagtttagaaaacaattgcttatgttaaattgcattagaaactaattaaaaaccattataaaaataacaagtgagaacctgcttaaaatgttaccaagagtcaagcatttctgatattccagggatgatggtgaggcaatatatacttgagatgatgaatccgctgattggggatttaaaaactgattgtcccctgagtcaggtcagaccacagtgtgtccaaggtgatgatcataatgataaccagacataaaataaatgtcttttatcttgtgtctggactatatatatatttcaccaaataaggctctaacaatatgtattgattttcacatttttaacccagagaatgaaagagttctaaattggtgtgaaaagacggaagattaatttgtttattttacctgttttacatttgtgaagctgctttctctattctgtttgatatgcaaactcacatttgccattcatacaatagtggtaataatgtgggattaacagaaagccttaaatctcattaagttcttggaaaatgtcattctcttctccccacattgtattaaaataaaaggcaaaaacataaaacaggtttcttaggagagaaggatactctttcggaaatgaagattacgttcagagctactctcatatgcccctgctcccttaggctcaaaacagttcatgtttaactacgttttatatcttctctttcccatttatgtttgaaactatagtgctaaacagatttttgggttttggttttggcatattaaaggctgcaaggatctcttcatcaaaaatgaacgatcctctcctatccttagaccttcccctttctgagctggatctacatatttgcgcacctagaaatactgtagtcaaatgtcgatgatgaaaagaaaaatgacccccactggcatggacactgtggccaggtttccataacactgacttcagagcctttctgtccgcctaggcttgaaagaggccattacttctgaacaaaatgaatcgatcttttagaaaaatactgttaatggggtaacttgggaggaaaacataaatgaagccctggtaacttaatggaatgtttaaaaacattttttaatggaatcattatttaactataaaacacttaaaactgtagtaaaaagaagaaaaacataaccacctcactgatgaatcaaatttttaatagggatccttatattcatattcagtttatttttacaaataaaaattgtggggtttttttgcatttataatgtaatcatcaagtctgaaagcttccaatttatttccatgatacacccaataaaacatgtaaatagataaggatactattttagggaaactaatataagaagttgtatctgaatagaaaactagtatttaaataaaatcaagagcttgcggcaatctacatgtttatgtgatttcttccctgctactacaatattttggaggtgggagtgttatgagaaggtatttcttatgttttgagaatattacttagattaagatgaagctgtataatagtagtgctaacttcttatttaatgccttagatttaaattgattttgatttgacctgtttgatcattagtcattttttaaaaatattaattcaagtataaggttttgagattatagtttatttttaatgatttctctcacagaatgatttcttaatgctggggacttttaaaaatattcaatctaaaatctaatggcatgtagaacttttaatccaagttagttgcattgttttaagtaaaaccttgagactaaagaaaacacatgcctaaacaaatgtatccaactttgtgaatatttctaggtaaactggaatttatacaatcataatttagagtattaggaaggtaatttatttatgaaggcttaaattgctgccaaaaaagctcaacctgtgaatgctaagcctttgcaacaacaaacggtatttcaaataaactacatatacggttaaactgaaaaactggagtacatcaggttagttgatagtgacagcaaaatgctttctaagcagcctgtctggtagttaaattttccatgatcatcagatttcaggaaagttccaattcttttgttcaatgccaggcaagcagaaggacctctaactctcctcttgagagtcatgaagtctgaagggtttgctgagaggcagagaagcaagtgtgccttttcatacttggttttatccagactattttctagcctgaacaaggtccttgtttcatttatggaaaatagaggataaaatttccaatgctaagtatttttactttttctttttctgttactggttattttccccggtacgtttctgacaaatgaatcaaattctgcttcatttattttgacttgtaaagttaaatcaagcatccttaaaacaaaaaggcaaactgggatattatccgtcagcatagtgaatgctgcttccttttatgatattaaacccaaagtaaatgaattagagaacaagagttgtaagaacgagtaagatattaatttagagagtggtgaaggtaagtggtgcagagtttggggtgggggcatgctttaaatttgtgcttttgagcaaatgcaattaaaagtttgcctacttttgttaaaccacgttttaccattgcagacttcaaattcctttttaacagtgtgggtacaacttggttgatgtgctttaaatttctaatatttaagtttccatacagtagttcagcaaatacatttattttagtctactgtgtggcaagcactatactggtcggtgagaccacctgaaatcataaaatacattgtttttcatgtccaagcagggtattacttaaaccagatgaagaggaagaaaatcaacaacacataaactgatcaatccacagtccagtggcacactttaaaaatggtttttaaccaaatgtggtctgtgggttttctcttcaaagttgcctcggtaacttgtgcacatgtaaagtgaaagaataaagaacaaaagctgtcattgtctcatcgagtgagagcaatttctccctcctttgatttaaacagaataatacctgcagaaagctttttatacatccctgacacttgattttagggtaggaaagagattatgcatatgcaaaacaaatgaaattttagcttttgcttaaattatattctattgctttctacttaaaatctgttttctctggggttttcgtaaatagataactcaaagttctttcttacacaacataaacatagctttgaaaactgtcttttagtgtgatgtttaaccaaattgagtgatgtcgatctgtattttgaaactggaaaatactttttgaaatgtgtatacctattttcttaagaggaagaatgctgtttcagaagaccaactctttgttggaaatttatttgttgactttcagtaaatttttgaaatggtggaatgttagaaggagctgagaaacatccctttttatgctctgaagagaaaatgcagttttgaggattaatattgctgagagatttttactgtagagtttttgcccactggggggtggtacactctaccagaacactgctttctgaagccgcaagtcagatgttggctgctgctggccagtttttctctggtttaattacaacaaagcctcccgttgagaagaacagtgaaggcctctggggcaaaaggtggggggtgggagggaagggggaaggaggaaagacggaggggagaaattatggcctttgaaaaattactgaatcttatttccattgttgactttatttatggtagtcttcatttgatttaaacagttatttctaatgctttttttttttaaataaatgggtttgaataaaagaatatataaggggatctattcagaatttttaagttagctctggattttgccattaatcaatcacattctttgttatatagcccacccaccttaaaaagaggcatagaagttaagaaatgactgaaatggcaactataaaccaatactttttcattgaccagatttaatattggtatgaacattggcatatcaaaaatgaaaagcaagaaagaagaaacattaatatattattaagacaaggccaattccctgcactgatttttgtagggcttaaaactgttcaaaataatccagaaaaaggaggaagccttagggtgtgtggccaagaaaagcacagaaaaatctctctgcagtgcacttgcatgtttaaagctgattattgtatttttcatctagagagactgagtgttcattagggtcttgtgtccctaggcaggagatgctgagcataattggagtttctatttgattgggcaatatagtctagagaagaaactggggtaaagataattaatagcttgctaacaaagtctgacagccacaagatttcaaccaaatttatttcacactgcttcatttagctctgaaaaagttttgatagaattgtaggctccttaattaacacttgaaagcaaaagaaacataccttctattttgctgccacatttagttatgacagattttcttactgtttttcttctttttgtaaaaactttatttgctatccaattatatatctcacaaacgttatgtttgggaagtgtttaattgtgcattttgaacccagtcataattgattttaaagggtggggtgcagcgaaatgaaaaacccaattagtaactggtagacagttttacagaaccgcaatattaatgaattcattatgtttattcattcactaatattttgctgatccttggacttgatgtgttttggttgtgctcttcaaaaaatcaaattttagttttcttagtaaatctatgcgtttttgtaactctgtttttatttcagggtaataaatagatgtgcgtttgtctgtgtgtatatatatgtgtccaaactaaggggcatatctctgatttaattttcccatggtaaaacctggcatattatcattaatatttgtagtagttggtaatgttgatattattgattgtggcacttttaaaggattaatttttctttactcatttcggaagagatgaatattagtcatctgtcactttgggtcaggtataagtgattctccctgaatataagcaaatttattctttatgtttaggctggtcaggatatttttatgcagtcagagataaatgaaaggcattgctacagctgaaggacttttctagtggctttatttatgttgtttctggataataaaataacatagatgagcattttagacagatttattaatagacagatttattaagaatgtttaaaatagccttattattaaaaccattagagattttggactaaaaattgaaaaaaaaatcaattttttttcttttaaattctaaataaaataataaaaacaaaccccccagatgttgagaagacatggatgggcctgttgcactctttacctatatgcaaccattttgtttcagacctaattcagtgaacaaaattttttgagaagatacatttaactactttttcaagctttgtagtataaatgcatttcttccaatataagattttcctattataagttgcaaagaatggatcctctgcaaaacccacttgataagggctctactcatttatttttctttcctgctaccccaaactcactgcatacatcaggcatagcttccagggtgagctttgttagtttttctgagtagacttagccatttactatgctagtcacatacttcacttgcctaagcaatggattttggtgttctattgaagagggaatatggtttggaagagtgtctccccctcctctgagttcaatttactagttgagatttgcaagcctgaaatgcttgaagcagctcaggcacgatagcagtgcaagctttaaaatctaggtgtagctgttaatcctttacagaggcacataagtctccaggagtagctcggctagctgtgagcaagatgtatgcttttcatgtactgcgtactcatgggctgagggattattgattttctttcacagttgtaaaaacagcaattggtgatcatcccacacgtacagtacacaccaagttgctttcctatctgtgaagaatctccttgtattctttaatatttaacattgaactttccaacttgctgttttccataaggctcttttcacatagcaattactcaagacagaaaatagccacttactatcttttataaatgaaagaaggttctaagaaacttcttacattcagccatgatagtgaaatttttcattgctggcttgcacgcacatatattgcttgttgtggtgacagagcaaacgttcctatttggatttctcatagtatcaagtcgtttctttctagagagtaaaaccaagcaaactttctgggacaatcataagaaaaaacatggaaaacacttaccaggaagacgagaaaaagcaatcctatatacactgccgctatagctgtaattccattgacagtgaattggagtaatagccctcccccgtctcccaagctctgcgtccagtccacacaaagcccacggcagctgcaggctgagcttgtcctgcttcagatcactcctacactgaggagtgagcgagggagagcattccagtttactgcacacagcccacctccaagtctgaagtttaaagcttcacctcgcagtggctgaagaagggggtgatgtcatagatgggcaggacttagccaagatcttgttcagtgaggtaactggataatcagacagatgagctttgcaaacgctagagggggcgagagcagccaaaatgaagcatcagcctgccaaagctaggatgccatttggtttgtaggcagccctttggaatctcaacattttctaaagtttactacaaggcagtggtagcatacttatgtattttttttaaaaagcatgttagaaagatatttttaagatcacaatagaaaaagacaggctttgtcttatttttaaaccatctgtattgaaaagaagttaaccaaaatcaaattagttttattattcactagctaaaataatgttataattgtggaagatgtatgccagtaatcccaactgtgaatgtttattcaacatatgaataaacagcagattcaaatatatacatcagggctgggtgtggtggctcacgcctctaattccggcactttgggaggccgaggtgggaggatcacctgaggtcaggagttcgagaccagcctgaccaacatgtagaaaaaattagctgggcgcccgtaatcccagctgtttgggaggctgaggcaggagaatcacttgaacccgggaggcagaggttgcagtgagccaagattgcaccattgcactccagcctgggcaacaagaacgaaactccatctccaatatatgtatatatatacacgtgtcactgattcatttagttatgggaagggcaataggaatgccaaaagatttttttaaatggtattaaatggtctgttcttttggaggcgaagaagttactgttctctatgttttagaaaatgaaagtatgttttatgtacttctgctacgtgtttatattatttaaaatggattatttatatttaacgatcccccaataaaatgtttttaaaaaatttaatagaatattttcctttctaaatgtttttgctgatctgagcatgggtttagatataaacatcttaagaaaaaaatctttcagggtggtttgcctggattgaaattattttagtttaatttaggtacatgaataaacactggacaattgtaagacgtggagattataaatttctatgcctaattaacagaattatacttgtatttttaattatgatttttgtagactggtttctgctatttggtcaacaattgctttgtgcccgtaagttttccatcaaataagtgtatttcacttgttcatgttggtggtaagaacttagcttttatatttacctggaggaccgttgtcttaaactaatatctttatttgctctattcttagaggtgcatgaccttctcctttgtcctttctcaatttttccctgcatgtttatttctgaagaaggccagctaatagtctttcccaggactatttgattgtggtctcttcattagcttcatttagtttatctatttatatatttgtttgataacagtttgacctgagttcccttccaagaatgggtgatatcaaagtaggtgaacccttgataagaaatgtattgaccctattgttctatgattgcacttttgtgggcctcagaggacagacccattaaatctaggagttttagattctaatgtccattgaaaagccaatttctttgaactgctaggtagtacaattaaactgatatgcagcagctgaattttgggaggaaagggaggtggatatttttctgttactatgaaacaaagacatggattaaattattttattaaataattatttctagaagccattttcagataggagttggttctgtttaaaaaagaaaatttttgcctggtcaaattcctgtgggtttatagccatatttaatcagtttcgtcttcattcaggcaggccttaaacagaaaagaaaaatcaattggtgaattgggttataggtatcaaaaataaattgtactggcctgggagttagcagtttggaggtttcccttctctgggctgccattgttatatgacttcatatttgttgccctaggctttggtttcatcacttgacaaataaaggcagcaaggatttattaaatgccaattattttttgttgctttttttccccttttaagctatggattaaaatatgggaaaagaaaagaaattgtgaaaatatattctatactggggtactgactttgggggcaaactcttagtagaatctgtggcctcctattctgtccaaaaatatatactcttttgctgcatacatagtttttcacttcccgctcttatcagctacctgaaatgctactagttgaaggtgaatttataataatgtgtgccccctttgaaatagtatgtacaatctctggaaacatgaggttatcatgagttacttcagattgccctcctcttttgttttctaaggcactttggctacaataaggggatgactgttttgattgaaggggatggaatgctggcaatctttagcatgaaacccttttggctgtaataggaagggaggaggtggattctcatatcaggaaggacttggctcagggtagaggacaaccagtgtagtagacctgggtagtttaagaacatgggcttcagagattagcacagctgggctccatgttggctttgccacatgactgtagacaaattacttaatctctttgagtttgttagctcagtgcctgactcatagtaagtgctcaataagacgatagctgtcattatttaagatgggggacatccaagcacctggaacaaaaaggacactaagaatgggagaagaatacacaaagggaggtagtacagggccaataacagatttttggaatttttcaaatttctctttgaagtaattttacagtcagtaaatggaagtggaaaagaggaatagaagagcatttcattgattttttttttctcttgtacttacacatctcatgacctcatgttcccagaacttaacacttagttgggttctagtagatattttgggttgaaaagatgtttgctgttttgcattttgttctgttttgttggctagcctgtgaatctagcattgtacgtgagaaagtgcatttcagattgaaagcaactggtttggaaatgaacttcaataacatatcccagttttaaaactctaggactatctaaacttgtcatctcaaaggactttgtggtgttctttgtttgtttttatgagaaaatgtgagatgttcactagtggacatgaaagtagattggatttggaattgggtttcccaggttctgccatttacttgtatatccagacaaaaaaatgaaaaacaacatacacacagaagcctcaaatctgtcttttagttaccaactaccagctgaaactgactaaaacacacagtcatttcatggaacaatacaattcaggtctgtctagagttaagctacctcattcacacattcattcattcagtcttcacattcatttattcattcatcatatacatatttattgactccctgtgtaaaagaaactagtaggactagatgatccccaaactatctccaactatgaagttctgagatttaatcttagaagacattaaggttcttttaagcctaagaaacattcttcatgattttcctttccctcagcattcttcatgagaataaaatcttcaaaattgtgtaaagaaaacagtttggatgggcgcagtggctcatgcctgtaatcccagcactttgggaggccgaggcgggaggatcacctgaagtcaggagtttgagaccagcctggttaacgtggtgaaaccccgtttctagtaaaaatacaaaaagttagccgggcgtggtggcacgtgcctgtaatcccagctacttgggaggctgaggcaagagaaccacttgaacccaggaggtggaggttgcagtgagctgagattgtaccatgcactccagcttgggcagtacaagcgaaactccatctcaaaaagaaaagaaaagaaaaaatagttcatacttttgatagattaaatgtcttggactgttattagttaagatacttttggttgcaagtcattgaagatctaagccttacctgcaaaatcaacaatgggaatccattggttcatgtaactgagaagttaaaatgtatagtacaacttcaggtaaagcttgatacatggcttaaaatatgtcaataagaatacagtttctctctggctctctgtcctgcctttctcattgttggcagcctcctcaggctatatacagtggacctttggcagctctgggatttcctcttaggcaataacagttccacatatcacattcccataacacaatgttcaagggagagaagcgtcctccaaaagcccctgcacggagccctgggggggtcactgtttctcatttgcttaaacttgatcacaggttcattcccgaacctattacatgggtggggagataacgctggtgagcttaagcccaatgcaggagctgcagataagcccagccttactcagacacagaactgagaatggaggacagggcatgatccaaaggaaaatggggtactcttaggttgagaaggaaggagtggatgctaaggatcagctcattttcagaggttttaccatgctgaaacttgggcatattttatacatgtataaacttgaaactgctctttttctctttgtcttttttttcttaagccagagtttctgttaaaattgccaaaacatctttaaaagatactcttatttgtagacgctctcaagtctagcccagatttttctgtcaacaggtagtgatgcatgtcagggcacatcagtattacatcttagcataagcctataggatgttaataaaatatatagagagtgcactatctgtaattctgtgaagtcaggccagatgcttaatgtagtagttagaaactataccacatctttctcaacaattccaaagggtattggagaaataattagattttagcaggtcacggatgccttagaatgccgaaaggttttgaaaatgctacgttaaactgttcttttgttctgatatttgccttttattagtcaacacttaaaatgtacctaaaaacaatcacataacccttttaactatattcccaaaacattctgcactggaatgagatctgtcattacaggacttgaaacagatatcaaagcaaaatcagagtggttatttccctgcctgcctgcctgcttgcccaccctctggtacacccttcttttccccaacactcatgttggactgttacactttggggactgggagaaatgcaattaaaaatcacaactgagaaaaagcacctccttggcctcccaggaaagaaaggaggaattgtggttcagaataagctagtaaaagtcacggggtgtggcagtagctggtgcaaaactagaagcctgctgatccctactttcttccctcttcagcacctccatatatggccatgcagatacagcatatagaactccagctgatataggtcaaagctgtgtccttgaccccttgccactccccagtgccctgtccccttcacttgttttaaaatgttaaaaaaaaaaaagacttaaaatgatccttgaaaaaaatgagagacttggaggaagcagattgagtcaatcatttctatatgatactttctatgtggccctgagaaaataactggagctctttgagccttagttcctttatttatgaagacaggtatgtggcacccacctaatttcctattatggacttcaaataaagtggtggatgtaatagttcactactaaatccgagaaagcacataccaagactgagttgaaacctggggatagttgcttttaatcttcatagtgatgagtggggccaggatcagttcaaaagaaacaattcactaatgtcaaattgaactgtgtgctttaacaatttatctttgggaatgaaacaatttgagaaatgcttctgccttctctcctggatgctagactttgagataacagtatctaaccctggttctgagacttaattacaaatcaaaggacaaattccttatctttggcaatgattagtataaaatacagctttggaggaatgactaacagttaataggagcagatcaatatgtgtctgattattgacatgtggatcaacaagatattatacaagtggattgccctgaagcacgtgattttctctgtgtagccagctactgctgtcagtttggaccaaagtggtcgtcattttgaaaccatcttattgtttcactatttctggagtattggtgctaattttagacacacaaatagactttctgaaaggaagattttctgaaattgtcagatttttttttctggaaactggctctgtagttctccttgtattggagattatctctttgctatttctctgcagtctagactacttgggtacattaacatgcttaatgttgaaagaaacatgtttaaggtagagtcaaagactgttttctattttatcagtttattaatgactatggaaattgcccttcattggcactgtctgcaggaagcagatttactacaattagcatttattgccccttgggaactgatatgaactgattatttgccagattttcggggatcaagtatcagttgattagatttggattatgtaaatgttttacaatctattccaaataaaataagttaaaaattaagtcacatttaccattgggaaattttctgtaaaatataaaggtacttaaattttctaagcatgatttatgataaatatgttatatattaactagactcacttagttcattctgtaaatgattaacctcaaatttgaggaatttgaaaacattttataattttttcactagttttgtttgttttttgttttgtttgacatttgaagtgtattcatgctggaaattcacaaatactttgctaggtttcctatgtggatttaaaaattaagatctagactgaacaagtttatttaaagtacacaaatattgccaaaatgtatttatagtttaatgagctttcattcttatgttcaaagttgttttaaaaattgaaggtagacttgaaaaagaataaaaaagtgtgtcactttttaaagttattaatttttgtttggagaaattcaaggagctttttggttgtttaattctcatgtgtacatagaagcaacacacaactgtttgagcagctttggatgtaacccctctttgttttcttcagtagcccagggaacagacttgtcactcttaagtgctcacgtgtaatcctgtcctccctttcttccccaaggcaaatcagaaataagcttatcagatcatatcttattaacaaagaacaaaggattttgactgaccaaagagtaggaaaggactagcaaaatataaatgttaaatgtttgctgccaaaaatcctagtttgacagtggttttaggtaactaaactttttttgaaagtaggatttacatatttttaaaacatttgcctgaattatactttgtctaggattttaagtgcattagttaatggctttacctatattttatatatgaattaagtacaattgtcactcattattattgtcattgttattattatttgttccttacaagcaaatctttctagcttatatctgagagaagttagagacaattatattatatcctatgtgttttcagtataaagtgttttaacagaaagtataaatagccttctaataaagggagaagtgtttttctgatagaaagtacaatacattatttaggtaattataaggaacttttaaatcatatttgtgtcttgttttcttggttatttttatttgaaggtttttttttttcttagatggagtcttactctatcgcctaggctggagtagctgggactacaggaacgcaccaccatgcctggctaatttttgtatttttagtagagatgggttttgccatattggccaggctggtctcgaactcctgacgtcaggtgatctgccagcgttggcctcccaaagtgctgggattataggtgagagtcaccacacttggcctgaagatgatttttctataaggacaacaagttgttcattatttagagttgtgatagtaggaaggaaataactttagaaaggaagacagcaggctgggcaaggtggctcacacctgttatcccagcactttgatcacgaggtcaagagatcgagaccatcctggctaatatggtgaaaataaaaatataaaaaatactactaaaaatacaaaaaagttagctgggcgtggtggtgggcacctgtagtcccagctacttgggaggctgaggcaggagaatggcgtgaacctgggaggcagagcttgcagtgagccgagattgcaccactgcactccagcctgggtgacagagtgagattctgcctcaaaaaaaaaaaaaaaaaaaaaaaaaaaaaaagtaagagagcaattcccttgtgaaaatcaggcttgcattttcttgaagtttgaagtttaaagtaacctaactttatcacaaaaacaataatgatcccaaatatatttgggaagaaagataaatttttaatccatatgaatagcaaaaacataaacactacaagacgtatgaatgtagtgtttctattttgtttgctgtatgttctgtagacttcctgtgtggctcacattctatcaattgtttttttaaactttcttttcccttggcttctttgctcctacattatctgattctgcttaaggaagagcccctgaacaaagaacagatattaccatctccattctaatatagctgatttctagtaattgtatagcagatgctcgttcaagcacctatttatgtgtattctaacaaaaacatggtattcaggctcagagaggttacagttttttaaaacactttatccaacttactagcattctctttgttttgtttagattgattttactatcatctaagtctcagaatttgctaattaggaggaatgggtggtgatgtctaagtaatctgttgctttgagagtgtttagtagaaactcagacggaacaaaaggagtaagaaggagaaggtagaacaggtactctaagaggacccctagtttaatgccttgtttgccacgtgtcttcccttggtcagtttttcaacaaatgcttattgaatagcaaggtgtgcctcataagtctgatctcttttactatattctctgtttttcaaagactttataactaactttcccaagttggtctgtccacttatacatagattataggttggacaaaaccatctcatgacatagatatataggttcttgagcaatctcaaagaaatgacaaagaaactttttcgtggtctgtgggtgagaaggtcagcaacaatttaaccaatgtgctctagatcacaaaacgtatttgaaatgagactgaaagcagctagaggaaaagtttttgaagagatagtaaggagagaatcagaggtgctaagatagcaacagcatgttaatttgaggtgaaaagtgtcctaattagtaggtagattttggactctttatcagttactatggtggtaagtgcaagcaaggaagacagaggaaattctctaggaacattcataatgcacatatgagaggtcacccatccttgtagtgcgttttggggatggatagaggaatttgctgaattatagaggccaattatgaaaaagaaagtacgtagatttgggctaaataataatatcgatgtaatgagactagtattctaataatgataatagcatgaaaagagtagtggacagctaaatatagacgaaaatatagtaaaatctgattgtacaggatggtaagggtacacaaatatggagatgtgttactagtctggaatgtgacctaatcctgctgatttccatcttttgctcttccagggaagagagatgaggctttccaaaagctgccacttttaagtttacaggagaatccatgggattcccaagtttttatctgttctgtattcagaaatgcaattccttggctaagaaagggtcccctctaccatttgctttagaagaatgaaaactgacccttgccaagagagccagaactaagccttggctattaaaacgaagatatgggacatggggccaacatgtcccagccagatcacccacacatccattaggaatatggggcagctttcaggggtttctggtgtgtatccaggttaacatctagcctaacattgccatgtcagtggaggcaacagagtcatccaagatatgaaaccagaacaaatgtataggtataagccaggcacggtggcttacacctgtaatcccagcattttgggaggctgaggcaggtggatcatctgaggtcaggagtttgagaccagcctggccagcatgttgaaaccctgtccctatctctactaaaaatacaaaaacattagccggtgtggtggtacgcacctgtagtcccagctacttgggaggctgaggcaggagaattgcttgagcccaggaggtggaggttgcagtgagctgagattgtgccattgcactccaacctaggcgtcagagcaagactccgtctcaaaaaaaaaaaaataaataaaataaagaaagaaagaaagaaaagaaaagatgtatcggtattagaacatggaataaaaattctgtgacattaagggttcatggtaatttgtatcagaatgtacatgaaagaaaatatcaagaaggaaggtataccagttcaggatgtgttatctactaaatagtgtgccagaatcctaataggcatttctatttacatttggctcctctgaaccttattacttccttcaacttgtcttttatgaacaacatcttttattagtagacaaaaaaaaaaaagaatttcttatcagtttaggaaaaccaccaattgtcctgttatctcaaggaatgatttttggtggaatgtaccctaattctattttttctcctcagtatctttaatatgtgatgcttacagattcattaaaaaataaatgaatatttatgacttggaattttatgctatcaggaaccatatatgcattttttaactgtaagaaatgaactgaccactactgtctatttccatcagacttgtttcaattaacagcactttgggaggctgaggcaggcagatcacttgagcctaggagttcaagactagcttgggcaacatgatgaagtcccatctctacaaaaaatacaagaattagctgggcatggtggtacatgcctatggttccagctacttgggaggctgaggtgggaggattgcttgagcttaggaggtggaggttacagtgggccatgatcaccccactgtattcctgcctgggtaacagaatgaggccctgtctctaaataaataaacaaacaaataaataaatggaaaataaaaataatctgaattcccactatccagtattaacattgggtggtttaaagcctttcaaatatttacaacttgtacctatatacaaacttttttttttttttttttacaaattaggaaaatagtgtacttgttttataacttatttgttttttatttttaatttttgtgggtacatactaggtatatatatttatgaggtacatgagatactttaatacaagaatgcaatgtataataatcacatcatggaaaacagggtacccatcccttcaagcatttgtcctttgtgttgtacttcagttaatactcttttagttattttaaaatggctatagtcaccctgttatgctatcaaatatgaggtattattcattcttcttttatatatataatagtacctattaaccatatatattgtatctatatggttaattaattatatattatatattaacattatatatatatatattgtacctattaaccatccccacccacctccccactgcctcctgagtacttttcccagaccctggtaaccattcttttattctctgtctacatgaattccatcgttttgattttgaaattccacaaataagtgagaacatgtgatgttcgtctttctgtgcctggcttatttcatgtaatataatgaccttcagttccatccatgttattgcaaatgacagaatcttattctttttttcttttttttttttttttgcccaggctggagtgcaatgcgattctcctgcctcagcctcccaagtagctggaactacaggcatgcaccaccacgcccggctaattttttgtattttagtagagacggggtttcaccatgttggtcaggctggtctcaaactcctgacctcaggcgatccacccacctcagcctcccaaagtgctgggattacaggcgtgagccactgtgcctggccatcttattcttttttattttgtttggctgcatagtactccattgtgtataagtaccatatttactttatccatttatctgctgatgaactcttaggttgcttccaaatcttggttgttgtgagcagttctggaacaaacatgagcgtgcaaatatttcttcagtatactgatttcctttcttttgggtatataaccagcagtgggattgctgggtcatatgagagctctatttttagttttttgaggaacctcaaaactgttctccgtagtggttgtactaatttatgttcccaccaacagtgtatgatggttccctttttctccacaccctcgccagcatttattattgcctgtcttttggataaaagacaggcaataacaaatggggtgagttgatattttaactggggtgagatgatatctctttgtagttttgctttgcatttccctgatgattagtggtgtcaatcactttttcctatgcctgtttgctatttgtgtgtcttcttttgagaaatgtctattcaactattttgtccattttttgattggattaatattttttttcctatagagttcttgagctccttgtatattctggttattaatcccttgtcagatgggtagtttacagatattttctccttttctgtgggttgtctcttcactttgttgattgtttcctttgctgtgcagaaactttttaacttgatgtgatcccatttgcccatttttgctttggttgcctgtgcttgtggggtattactcaagaaatctttgcccagacctatgtcctgaagagtttcccttatgagtttcctcatagcttgaggtctcagatttcaatcttcaatccatttcgatttgatttttgtgtaaggtgagagatagggatcaagtttaattcttttgcatatggatattcagttttcccaggacaaattattgaagagactgtcttttccccaaggtgtgttcttggcacctttgtcaaaaatgagttcactgtaggtgtgtggatttctttctgggttctctattctgttccattgagctatgtgtctgtttttatgccagtaccatgctgttttggttgttatagccctgtagtacaatctgacgtcaggtaatgtggttccttcaactacttttctttttgttcagggtggctttggctattctggtttttttgttgttgttgttccacataattttttttaaatttctgtgaagattgtcattggtgttttgatagagattgcattgaatctgtagattgctctgggtggtatggatattttaataatattgattatttcactccatgaacatggaatatctttccatttttgtgtgttgtcttcaatttcttgcatcagtgttttatatttttaattgtacagatctttcacttatttggttaattcctaggtatttaattttatttgtggctattgtaaatgggatttcttttttaatgttcttttcaggttgttcattgttggcatatagaaatgctactgatttttgcatgttgattttgtgtcctgcaactttactgaatttatcagttctaatagtttttggtggagtgtttatgtttttccaaacataagatcatatcatctgcaaataaggaaactttgtcttcttcctttccaatttggatgccctttatttctttctcttgtcttactgctctagctaggactttcagttctatgttgaataacagtggtgagagtgggcatccttgtcatgttacagatctaaaaggaaaggctttcctcactcagtatgatgctagctgtgggtctgtcatatatggctgttatgttgaggttcatttgttctatatccagttatttgagggtgtttatcatgaaaggatgtataactttatcgaatgctttttcagcagcaattgaaatgatcagatactttttgtcttttgttctgtagatatgatatatcacactaattgatttgcatatgttgaaccatccttacatcccagggataaaccccactttgtcataatgaatgatcttttcaataagttgtttaatgcaatttgctagtattttggtgaggttttgcatcaatattcttcagagatattggcctgtagtttttgttttgtttttggtgtgtctaacttatttgttttatgactttgcacagggacctgcataactagcctctctagctgggcgtttgtgtgctttccagtttttcaagattgtgagcaagttttgataaaaatactcgtctcgcttcggcagcacatagacttaaattggaacgatatagagaagattagaatggcccctgcacaaggatgacaagcaaatttgtgaagcattccatatttaaaaaagaaaaaaatactcctaactaaatctttatgcttattatgtatatttattaggataacttctttgaggtaaaactgatggtttatagggatgacactcttttaatgaatttgctgtaattacaagattgccctccagaaaggatatatgcacccttctaacctctgccccttcagtaacattgagtagtgttcatctttaacttaataggagatacattgtatgttaatattgatttaatttgtatttatagaaggagcacattttcttgttttgggaaaggatgttttctttttcttctttttctcgttccttaatttcccctttttggctaaactttttctatgtgatccatttttttttttagtagataaacatggaagtacagagactaatagaacaacaatgcaccacccagaattaacaaaggttaacatttgaatatttttgctttagcttcttcattaaaaatgggatataatatgataataaagttgaaatattatgagtttccactctcatccactcacctctttccttatccataggcatctactatcatcaatttgatggtattttccagtttatgtttttcatatttgtttaattaaaattagcgttagctgtgactcttcaaaaattcaaattatgagtggcttaaacaatatggatgttgatttgtcacttgtgtaaaagtccaaatagggggtctagggtgtgtatggtcctccacatagtcagcgacccatgtttcttccaacttgttgctttatagtgggttaccttggtctcataatagtagcagccttattccaggaagaacagaaaagggattataaatatactagaattaataattactcatctgttataattaatagcaataattacttattttaatgataatttattcattaactgcaaaactgtatttagttgtctcctgtgcaaataagactgcaaggaacattcttttccatatctcctactccacatgtgtgagtttctcttggtgaatatacctagaagtggaattttagggttttaagggatgactattttttacctatactagatattgcaaaatttttaagctttctctgttagagtatttttaaccacaggtaacagacaatggaatttaaagtggcttaaataaagaaagctatcaatcacctcatataataagaagtccagaggtagaactgctctagatttgggtaattcattgactcaatagctttcctcttggtcatgaagaatcaggcgcagacaaaaccatggccagaggcgtttattcctctatgtctcttttgaagggcaaagaaactttctttagaaatttgtgttagctacattctttcatgtttcattggttaaaattaaatcacatgccaatgcctaaattgattacttgtaagggtctacaagaccatgatgattggctggggggcaaggctaattttgcttaaaaaatatcatcaggaggaaggagatacctgaaaaaaatatacctttaggaaggaagaaggggaaggtgggtgtcaagtcggcaatctgcagtgtctgctctgtctctaaagtggttactgcattcccatcattagtatttgagttattaattgtcaggatttttgtttgttttaccaatctaatgatcaacactttgttgttgtattccttagaattttctgtttctattgggttgtacacctttttagatatttatagacccttaggcttttcttttctttgaagtaccttagctatgttctttgcctgatattctcctaagttatttgtacttttcttattgatttgtagcagttctttacatattcaggataataattacttgtatgtatacttgtgttggaagtttcttccatcagtgaatggcttgtgtttttacatttgtttgcattaaaaatgtttttataacttaaatatttgtttcttgtgtcttattcgaagaaccattttttataccaaagtcatacaggttttttttctatttcttattgaattttaggtggatatcagcctttgcttgctatatcctagcagtttttaaagtgatggatggactctttcaaagtgtctgcaagactaaaattatttttataatgatattaagatgtcatttgccctttcccccatatatgtagaattgggtctttttcaacttttattttagattcacgggtacctgtgcaggtttgttacatggatatattgaatgatgctgaggttcggggtacaaatgatcttatcacataggccctgagcacggtacccaacagttagtttttcaacccttgttcccctctctcccttccttctctagtagttcccagtttctgtgtattcccaggtattttattttgttcatggctattggctttatgcctatgagtatccagtgtttagctcccacttctaggtgagaacatgcagtatttggttttctgttcctgcattaattcacttaggataatgacctctggctgcatctgtgttgctgcaaagatatgatttcattctttcttatggctgtgtaatattccatggtgtatatgtaccacattctctttatccaatccactagtgatgggcacctaggttgattccatgtctttctattgtgaacagtgttgcagaatagaaactggtagaatgatttgttttcttatagatatatacccagcaatgggattgcagggtagttctaagttctttgagaaacctccaaactgctttccacagtggctcaactaatttacattcccaacagtgcatatacaggtcattaacaaaattaacataaaagataccacttgtaacctatcaaattataaaataatgtcttaaatgataactaatataagacagagtgagttatgactctgactaggagtgtaaagtgataactttctggaaatatgttgcaaagaccccactaatccatatatttttaactcagtaatttctgttctagaagctagcctgaggaaactgtaagaaagacgttcagtgtagaattatttaaaagataaaaaagtggaagcaaccacatatccatcaataaaatacagaatcaagttttatctatggagagaattattttgtaaccatttatgtggtttttttgtgatgacatggaaatatattatgtaattgtgagaaaatcagcatataaaactctacatgtcttatgattttaatgatattaagagcaaatttgaaatggaaaaaaggaaagaaactatcaaaatgtttacagtggttatctctgagtattgttatgcatattttaaaaattagctttccaactttttatgataatatatattgttttcactaatacaagtgttattaaaaaggtctggtagagattggctatttttcatttcagccttgagattattgggagtggagagggcccttttatgaaatgaagtctcttatttctttggggagggagtagaacatttggtagtgtgtctttcccgatagaaagagaggaatgtgacccagcagggcctggggcagcagatactaactcagctggatttcaagaacaaccattggatcctgatttagtggaatgcactccagactgcttagtgtcatggttaagggtgctagttttgtagccagagtttctagtttatagcctagttctgccacttgtgagctgaattaagttttgggtaaattacttaatctctgtgtgtgtgtttcagtgtttccatatatgaattgggaataataacactctctgtgccatggagtttttaagagaataaactgaattattgtgtttaaaattgtcagcagagtattcccacataataacctcttactatttttttagtaagttttaataggtcttactattagtggtttaatcagctatctattacctcataacaaacctccccaaaattggtgccctaaaataacatgaaataacttatttagtccataaatctcaatagttatagctcatctctgctccacagggcatcaactgagatggctcacctgggggctggaggatctactttctttttttttttttttttttttttcgagatggagtcttgctctgtcacccagggtggagggcagtggtgcaattttggctcactgcaacctccgcctcctgggttcaagcagttctcctgcctcaacctcccaagtagctgggattacaagcatgagccaccatgcctggctagtttttatatttttagtagagatgaggtttcaccatgttggacaggctggtctcaaactcctgacttcaggcgatctgcccaccttggcctcccaaagtgctgggattacaggcgtgagccaccgtgcctggcctggaggatctactttcaagagacctcacgcacggctggcatattggcgctggcttctgctaggagcccagccagagctgtgtgatgggggtctctattttctccaagtgggcttcttcaggactgtccaggcttccctatggcagcatgtctggatttggaaagtgagcatcttgaacaaaacaggcagaagtgcatcacatttttataacctgtcctcagtagtgacttctttatcctactacttcatggagtactacttccatcatagtcatgaatccatccagatttaagagggaggaacgtagacacttccctgtctatgtgaggagtgttgggcacattgtaagaagagtatgagtggtggaaaatattgtttcagccatgtttgagaaatacagctggccatggcagtctactgaccttttagataacataatatgcttggctttcttatccactaacagcagcaatctcaattctgtgtattagaaccatcttaggactttttactaaatgcagattatgagtgacttttcatttcttttgaatattttctgtatttttcaatgttgaaaacttattactataatgaaaagttttaaatgaaaagataaactttttttgcaatgtatctagatattctacaatctatgaatgtaagatttctatgtagaattttaaaaatctattacactccttctttcttggtttggtcatatttctagtagcactgacctctagaatgaaagaaaagaaagaaaaaaaagattctactcacaaatatttctatgttaaatgtagtggttcctcagggcaaaccttagacaccaaatacagcctataaaactatgaagtgtgatttccactggcttctccttagaactctgggttgcaaacaactgatgagcagctgctggcttttactgctagtgaacttgaacagagagcagtttctattcatctgtcaagaaggacaggcacacaataaatttttgactacatttgatgatacaattcatgcaaataaacttgcaaataagacagtgctctcaagatttcaagaaatggccaaggaggctgttttgcccctcctccccaaaaaactttggagctgccactgatctcacacaaagtcatctctttgaattaaacatgtcttattctgaaagatgccaaggcctggtccattgaaacattcaacttgtctttgcagctgtaatttatttcttctctttcttcccatcaaatgggaaaattgttcattttaaaaagcaaagaccatttaaggtttgaggcaaaaagagaatgaaatatggaagtcaagggtcagtttcaaaaaggaatagtactgtataacaatttagtttacttctaagtggcaactgttgttacatatatataggataaagtatgcaggagtaaatagtggattgaatgtcactgtggtgacccaaaggagtcaatgcaacctctcaagtagattaacttattcttggggacagtttataaaatggcagatttggggctcaatataatttttattcattgaacatatatatattccagtttctatcctaaatacttatattaactcatgaaattctcttaacacccctaggaggtagttagtaccattgtcctgcttttttattttttatttttattttttgagatggagtctcactctgttgccaggctggagtgcagtggtgcaatctcggctcacggcaacctctgcctccctggttcaagtgattctcctgcctcagcctccctagtagctgggactacaggtgcccaccaccacgtctggctaattttttgtatttttggtagagacagggttttaccatgttggccaggatggtctcgatttcttgacctcgtgatccacccgcctcgacctcccaaagtgctgggattacaggcgtgagccactgcgcttgtccaccattgtcctgcttttacagaacaaagtggttaagaaacttgcccaaggtcacacagagttgcactcaggtttcaaaccctggctgacctcttttcacctattgtgctttattgcttcacagataagtttttgaaaaaattgtagtgaggccaggcatggtggctcatgcctgtaatctcagcactttaagaagctgaggagggaggatcgcttgagcccaggagttcaagaccagcttgggcaacataatgggacctcatctctacaaaaaatttaaaaaattagccaggcatagtggtgcctgcctgtagtcccagctacttggcaggttggggtgagaggatcacttgaacccaagaggtagaggttacagtgagccaagatcgcaccactgcaatacagcctgggcgacagagcaagactctgtctcaaaaacaaacaaacaaacaaacaaaaaacacctagattgagagatcatgaataattatctgtaggggatttttttcagagttcacatgcaaaaattaagggtggttattaccaaaaagacaaaagataacaattgttgatgaggatgtggagcaaagagaactcatgcacatttttggtgggaatgtaaactagtacagccattatggaaaacagtatggagattcctcaaaatattaaaaatagaactaccatatgattcatcaatcccaatactaggtatatatccaaaagaaatgaaatcagtatgtcaaaaggatatgtgcactcccatagtcattgttcataatagccaagatatggaatcaacctaagtattcatcaatggataaatggatagcaaaggctgggcatagtggctcacagctgtaatcccaatactttgggaggtcaaggggcaggattgcttgagttcaggagtttgagaccagcctgagcaacatggtaaaacccgtctctacaaacattagcctgacatggtggcacacacctatagtctcagctattcagggtgctgaggtgggaggatcacttgagcctgggaggttgacgctgcagtgaactgagattgcacgactgcactccagcctgggtgacagagtgagaccctgtctcaaacaaagaagggtaaagaaaatgtggaatatatacacaatagaatactattcagctttgaaaaaaaaatgaacatactgtcatttgcaacagcatggattaacgtggagaacgttatcttaaatgaaacaagccagacacaaaaagacaaataccacattatcttacttatatgtgaaatcttaaaaagttgaattcataaaggcagaaagtagaattgtggttaccggtggcttgctgggcacagggtggtggggggtggggctgggggctaggttggttcaaggggtccaaaatttcagttaggcgtgaggaataagttcaagagatctattgtactgtgtggtgactatagctaaataaaaatctatcgtatacttgaaaatcgctaggagaatagattttaattattctacccacaatcagcgtgtgaggtaatacatgtgttaattagctcaatttagccattccacaatgtatacatattttaaagaataatgttgtacatgataaatatatacaatttgtatttaaaaaacaagtaatgtttttttaaaggcaagaaatgtctcagaaagggaaggtaggcagcaaattgatacatttcaggttcattgttcaactttctttgcatctggaagttgagtccaatgggtttggaatgtgggagatgtctgacctgcactgctgtttgtaaaaagaacttgaatgagtcacttcatctctcctgaggatattaacagctgccctgacagccttgctaggttgttggagagagcaaatgaattatcatggttatcaaatcctgttgcaagctataaagacctcattactgttagttattgctgtaatcaggcatcttttcttttagaaaagcatttcaggaatgcctccttttagaagatcacattctgcagtttgttcctctatttttcactacattttatttaatgatacaggtgtgtcaaatgtttagcatggtgcctgccatatgatcacactgaatagattttattaattattacttaatttctagcagaagtcttggatttgcagaagcaattaagggaagatatctcacagaaggacagaagctgccgagtcaagatctgaaaagcagggcttcctagcttttccttgatgtcaaagaccataataatactgaagagagtttggaagtcgaattgctgttttcattctaattttagttttcggtgataatccctttcatttatactatctacttatgtacttatgtgccaaggccattgaaagtggctctttgaggactgtgttaaatgttctgggggcacatctaggtttgatgagaaggaatgtcatgatcactgcctccaggaggtagtatttgccatccctagcctattctagaaagtttataaaatatttttgcttccatttttaaatcataccctcactaccaccctctatatttgccaggggttagtttaccactgtgacgtgaggaaactgacattgtgactcctctttacctctgcatttttctcactagaccatgctgtgatggttttgcccattccttctcaggtttcaggttctgtcttgaaatctagaatggagctggatacataatagatgacccatacatttttgcagaattaaactttaatgaattgaaatttcactcctaaccaaatgatacatgtttaaagataaaagctcaaacttcaaaatggagctgctggtacttccctcattcttcctaaataccagagatttcagtctctgtaatgcatgtcactccaataggtggaaagggtgaacagggtcatttaatgacccgatactgttctcagatcatttttgttagaatggccattggactagggaggtgtctaaaaaccataagggctgtgaacaggatgccaaaaacaagccaatagctgatgtggcacccaatgggaatagggagaaaaagactcagtagctaggcattcttgcttcttcccaatgtacttttctgacatttgggctttttctgttttgcccatagctcaccttaaccttttaattttctttgtctgtgcccagcacaagtttactttctagagcccatttattgacgtctctggtttatctgcacatttcacaatcttttctagctgtttaataaaggtcatgtttatagctttagtattgatggtttgcccagtaggccaagtgtcagcttctgtaatgtccaatagaatcccttcccataagacaaagtcctaagatgttactcaggagtatgagtttttatagatccaaataatgacttttggtcttcaaaatatatcatatgttaataataataacttactacattccgatcattgttcccagcactttcttaatcttgataccaaccaagtgagacaggtacttttattgtcctacttttatagatgagaaaacagaggcacagaagtcaagaagctggtccaaggtctcctagtgattgctggagtcagtatgctatgctacttcccatgtgtgctatgtgtaacacttatgggtcaggccctgtggtagctagcgggattttgcagtgagcaagacagtttttaccctcttgagttcaagagttccctcagagaaccctccgccctcattcctaccattcatgccttaatggagacggcttttaaatgaagcatttgtgtaaaaatttcacagccccaagttaactttgtatagtatggtttaattgctctatctaggtgcatttcagacccctacgaaaaccaaacttgcatccccaggaatctttgatctcttgggctagaggaaaaaataacaccaaaaagttcctttgggaggaagagaattaacgatagattgaagcttattaaagcaatgaattgacacctgtgaatgaaaaccagatgttgaaatctctggggaaaaaaagatatgtaaatgtatacagggtatataatgaaccttaagagcatagataatagtaaaatgtagtaagataggaagcgatgacttttgagtattcttgtttttaatgtaattttttaaacatataagtacatataatttaattattaataatgaccatttaacaaccagctcacaaaatttctgaaaacttaacagttggcttttgagacccagtgggagccgtctgacacctgtttatttatatacacaaagaagttcaattaacattagccctgaagactcatatcactcagctccacctcttcacctggggtttggaggcagatacacttgagctctaactctcactctatattttattaaaactgagacatcaggcaaattactgtttctgagcctccttttattatctgtaaatataatataataattgtgaacaattatcttgtgccaaacacagttgtaattcaatgaatttctcaacggggagatactgtaattcctcattttacagctgtggaaatagaggagtagagagggtagatagcttgccccactgagaagtgaaagaggtgatatatgaacaaaggcattttggtcctaaaacatgccgttctaaccatctcaatatactgcctacgttatcagttatgaagatgaaatgacatagcatatttaatatgactggctcagtgaattctcttcaattctcttttccttcttcctatttagaaaataagattaggggccgggcgcggtggctcacgcctgtaatcccagcactttgggaggccgaggtgggcggatcacgaggtcaggatatcgagaccatcctggctaacacagtgaaaccctgtctgtactaaaaatacaaaaaaattagccgggcgcggtggcgcctgtagtcccagctattcgggaggctgaggcaggaaaatggcgtgaacccgggaggcggagcttgcagtgagcagacatcgcgccactgcactccagcctgggcgacagagccagactctgtctcaaaaaaaaaaaaaaaaaaaaaaaaaaaaaaaaataagattataagattaggaccacaaggtgttgttgggaatgtgtcagaaaaagggaacactgcaatctagtgatggtctcaatcatggtggcacagaaaaatcccctggggcacttttcaaaacatagatgccttggccacaccctgtactaattaccataaatccgaactctaggggtttggggcatgggtattagtgttttttaaaagcttcccaggtgattaaaaggtggttttctacttttagaattcttgataatggtactctcttactcctgtttgctgatcttttccttttttctcataaacacagtaagaagtactacacagaaaagaggtccacattagggaccaccttaatccaaacagaaaaattgatttggatttccttaacaagttactgcaaagcttataggtttgttagtggaagttccactttatgaaggcagattcctgctgatgtagaaatatgtaacctcattctacagtgagctgcagtcatcgtataggatcttacaaaggtttagttttgcctatcatttaatgatttgtgcgctttgtccccatatttagttgtataatttaaaaattattgtgaaatttacatatcataaaattgataattttaaagtgaacaacttagtagctaaggatgtattcacagtgttatgcaaccaccgcctctatttccaaaatattttcatcacctcaaaaggaaattgcatacccattaagcagttactccctattttccctggtcccttctctccttcccttagctcccagaaaccaccaaactgttttctgtttctaagaatttgccagtcaggatatttcacacaaatgggaattgtaccgtatatgacctcttgtattttgctttttttcgttagcataacgttttcaaagttcatttacattgtaccatgtgtcagtagttcattcctctttgtggctgaacaatattctcttgtgtgtccatgtcaaaatttgcccatccattcatctgctgctggacactttggtagtattttgttgaaaactttttttcatttatattcatgagcaatattggtctgaagttttcatatagtgttctgtctggctttggttcagagtaatgctagcttcatagaatgaattaggaagtatttcttccgctgctgtttcttgaaagaggttgttaaggagtggtgttaattcatctaaatgttaaattcttttaaatgttttcaagccacatggtcctgagcttgtctttgatgggtggtttttgattactgacttaatctctttacttgtgagagacctgttgatattttccatttcttctttagtcagttttggcagtttttgtgtttctaggaatttgttcattttatctacattattcaatttgttggtacacaattatttatagtattctcttataatcatttttatttctctaagattgagaaataaagcttagagaaataaaagtgggataaataaatgaaataataatgttcataaataacatacttatattgttataaataattatataataatatttatgtaataatgttcatgtataatagtgtttatagtgtttcatgctataaaacataatattcccactttcatttatgattattgtatattttttacccttttttcttagtccagctaaaggtttgttagttttgttgaaattttcaaagaaccaatttcttgtttcgttaactgtttgttgtttttctaatctccatttcatttatctctgctgtaatctttattatttccttcactctgttagctctgcacttagttttctgttctttttctagttccttaaagtgtaaagttaggttattgatttcagatcattcttttttataatacagattttgtaactattaatttccctctgagcactgcttttgctgtatcccatgaattttggcatgttgtattttcattttattttaggatattttctaatttcccttgtgatttctttggcctaatagttggttaatattgtgttatttaatttttatgtatttgtgaatattccagtttttcttctgttattgatctctagcttcatttattgtggttgaggaagatactttggatgacttcaattttttaaaatttatcatgacttgtttagtggcttaatatgtagtgtatcctgtagatgttccatgtgcacttgagaggaataagtattctgctgttgatggtggagtgtcctatatgtatctgttggatgtagtctgtttatagtgttgtccaaggcctgtatttccttattaatctcatgtctaaatattctatttattgttaaaagcagtgcatggatgtcttccacgattattgtataattggttgcttttccctgcaattctgtcaatttttgctttatatatttggttctctattattaggtgcatatatatttgtaatttttttatcttctttatatatttctacttttatctatatatagtgtcctttttgtaacttgtaactttttttttttttttgagactgagtctcactctgtcgccaggctggaggcagtggcgcaattttggctcactgcaatctctgcctcctgtgttcaagcaattcccttgcctcagcctcccaagtagctgggactacaggcacgcaccaccacacccggctaattttttttattttagtagagatggggtttcaccatgttggccaggatggtttcaatctcctgacatcatgatatgtcctccttggcctccgaaagtgctgggattacaggcatgagccaccacacccggccaacaatttttgacttaaagtctattttatctgattttagaataccacctctggtgtcttttagatatgacttacatggagtatcttttctcattctttcactttcagcctatctgtgtctttggatctaaaatgagtctcttatcacagcatgtagttgtatcaagttataaaattatatatattttactaatctctagctttttgttggagagtcatttaatttacattttaaataatttctgattaggaaaggcttgcttctgccattttgctatttgttttctgtatgtcttatagccttttgttcctcatttgcttctctactgccatattttgtgtttaactttttgaagtgtgcttttttgatcccttttccattttcttttgtgtatattttaaagacttttctttgtggtttgtatggggataacaattaaaatcctaaatttataacaatctagtttggattaatgccaacttagattcaataggatatcaaagttctgtttctatacagttctctcctcatgttaatgtttttatagataacatctttatacattgtgtgtctgataacatacattataattattgttttatgcatctgtcttttaaataccataggaaataaaaagaagagatacaaacaaaaatacaataatactggcttttatttatcatgcagttacttttactagagcgctgcatttcttcacgtgatttcaggttgctgcctagtatcctttttgttaagtctaaaggactccctttagcttttctcataggtcagttttacttatgaatagctcctttgctttttgtgttggttttcctggaactgtcttaatgtttcctggtttttgaaggacaattagccaaacatagaattcgtggttgacagttctttgcagtactttaaaaatgttatttaacttcttctatgattttgataataaatcagctattaattttattgaggatcccttgtatgttggatgaattgcttctccttggctgctttccagattccttctttacccttggtttccagtcatttgattataatttgtcttagtgtagatctctttacagttattcgtcttggagtttgttgagcttcttgaatgtgtgcatttatgtatttttcaaatttggaaagtgctcagccattatctttacaaattctgtctgctgtttctttttctcttctccatctggggttcttatgacatatatgttggtgtgcttgcttgtgttccacaaatctctttgattccattcatttatctttaaattcatttaaatttaaattctttggtaagtttttcatgttagttattgtacttttatttccagaatatctgtttagttcatttttataatttctttatctttactgatattctctacttgtttatacatcacattgctgatttcctttagctctttgattttttaaggacagttgatttaaagtctttattcattaagtccaaagtgtatgctccctcaagtacagtttttgttaatttcttcttttgatggggcatagtttgttgtttcttgcacacttcatacttttttggcttaaaactgggcatataggccacgcacagtggctcacgcctgtaattgcagcactttgggaggccgaggtgggcggatcatgaggtcaggagatcgagactaacacagtgaaaccctgtctctactagaaataccaaaaattagctgagtgcggtggcgggtgcctgtagtcccagctactcaggaggctgaggcaggagaatggcatgaacccggaaggcagagcttgcaatgagccgagatcgcaccactgcactctagcctgggtgacagagcgagactctgtctcaaaaaaaaaacacacacacacaaaactgggcatataaaatatgataacgtattaaatctagaaataagatttttccttctcctctgggtttacttttgtcccttgctatagcatgtagctatttgtttaatgactttttgaactaattttttaatgtagtattgtttttcatgtgtgttctctgaggtctctgttcctttagcctttgttcagctagtgtcttgatagagaataacttcaataacagaaggcaacagagaagaaacaaaagaaaaagtaaaaactttaaaaatcaagaaaaacaaaacaaaaaacctctcctaatgtttacagattggatctttgctgacaaacttcttcaacactttgctaggctatttttaagctctgtcttagccttcatttcctgtttgcattgatcctagagatcatctaaagctgaaagaataagtttttattagcgagcatgggcatggatttttttaaattcttcggtatacatgaatgctatacatgtcctatttcccaaggaaactctttagttcttctgcctgagctttgggtactctactatatgccccaactataatgtttttgtcttaggtagctgtggattttttgtttaccttacagtattttcaaggaatctctgctgcatttctcctctgaaggagtcctcagttagagaaacaaagtaaggtgctttgcgttattccccaagggatttcccatacaggttatagcaaatgtagttttttgcgagtaagattgtctttgcttcctccagaaccaaggaccagggttgcctactggggaagctacctgcagttttgaagactgctgtcaagccaaggagagagttggagcaggggcaaatacaaacatcacatacttttcttactgtttttaagtctcctttatcttttatttttaatattttggtttcagcattttcttggttgctatcaacctgcctattttcaagagttttgttagagttgattctgacacttttgcttgattttgaatatttctgtgggaacacaagctcttggagctacctactccgtcatcttcactgatgtcacttgcagtttactttcagggctttagttatccacatggtataatgtgcactgtccgttgaatactatttcctatttaccttttttctcttatttaattatttgcatatatttattttagaatatatgtactctaggtcttctctttacttcatgaaatctaccacctccataaaaaaagatgcattcaaagtagacttgataaatacttaatgttaaaagattttctttcacatagtttcagatttaataaagcaaaaatgcaatttcaaaaataatctttttgcaagttttgaaaaattctggctgctgaaaataaaattgaattattggcaaaggcaggaatttggaatagaataaatataaacttttgtgatgttaaaacaaattgtttcgttgaatattctttataagaaacaattaccatagagtcttcaagaccttattattagagataaatggaaattaatttatctcagctattatgaaaatgtgattttaaactttaatattaggtagactgctgctcaatagtttacaaacagaggaggtaagaaataattttggataaaatattaatgtatgagttataattgaattatcatgttatatagtctcttttaataattagcagttaatggaagaaaaaagcatgttctcattaataaatataaaaaagcatttaagttaaataaaagaaaaaggtagcttttgaggaaacttcagtctgaattgtccaaatagactgaaaggactttaagggcaaaattttgtttgggtttgggaataccaaaatttaggataaaatatttcttttatccttctttttttgttttgttttaagagaagaaaaaatttacatagactctttgtataccagtgagaggaagtatagcatagaaggccatctaaaggatgaaattcccataaggagttttctgaaccacttatatcaactggtcagaacttagttttaattaaatttgctgggctggggatggtggcaggacaatagcctgttttaaggatagagagccagctttaactttaactttgaatttcctggctccaatccattggtgtcactacttcagtgttatttaaatgcaggattttccatttaatttccttttaagggagataaaaaccacagtttctttttcagaaaactgccaaagagtctccctgtgctttattaagtaacaattgcattttcagtagagaaatgcaatctaagtggtagcacattaaaacattatagtgtaaatgtgcagatgaaaatactaaaaattaaataattattattcatagcagttaattcagttatatgtattttgaactcagtgggaaattgtttatacaacagacttaggatattaaaattaagtttaaaaatttgatttatttttataagacagacaataccaaaactcttttttcccttttatgccttgtattagttataatgtttgctcttacattttgtgactttgagcaatttatacttcattatacttaaaatagaaaaattttaggccaacttaattttttgtaagttttataaataataacttttgccaggtgtggtggctcatgcctgtgataccagctctttggtaggctgaggtgggaggatcacttgaggccaggagtttgagaccagcttaggcaacacagcaagaccccatctctacaagaaatttttaaaaattagcaggatgtggtggtgtgtgcctgtagtctcagctactcaggaggctgagatagaggatcccttgaatgaatccaggagttcaaagctgcagtgagtcatgatcatgctattgcactctgcgctgagtgacagagtgagactccatctctaacaacaaaaaaaagaagaaataataactttgatcatattttgtttgtatccatttgaatatctgcctttttatttttagtaatagagattttaaaatatagattattttttaatagttgacctcaatttacatacttgaatagtgagcatttactatattaaaattattagaaatcaagtgaaggaattaagtaactaaataaagtgacttttaaaatctacctgatatttctgtgtttatgataggctttaaagaagccattgctagattgccttccatgaaagccatttgtgcctaggttctctcttccatgattgctcttttcttttcttttctttttttttgaagaatgggaatgaagattcccattcttcagattttagctcaggcatcaattactcgagggccttttctgacctcccttaccacattagctccccccaacccctctgtatgttctcataacattatccttctcctccccagcattcataatagtttctagtttgacttctttgtgattatttgattaatgtctgtttccttgaccacgttttcctggtccgtgagggcagggaccttgcctgattttgcttatcatcataattcttgagccctgcataggcttggtccagaagcagattccagtgagtgcttgtgtgttgtatgaacgctgtactcggaagtactacatcatgctgtcctattttatgctgataaatgaacttcaaataattttactagaaaaaacatttatttattatatgtatgcaaaataagtcttaattaggaacattaatacagatatcctaaataaaatattagcaaattatatctagtagtgagcatatcaaaataataatacagagagtaatactaagactgtttcagaccagtaaatgaaataatgactgtaacatgggaataaaatatagtttggagatttgatagaaaatgtccatataaagtcttttgtgccttgtgtctttttagtggtatatttttggttaaatataaccaaaaaacaggtatatttaaccaattttcttggttaaaaatgatcgtattctaaatatattaaagaagggatatgtattaaattgtttctttgcttttctgattcaattcctctcaccgttacccccagctctcagccttccatctccccattcctttatttcttagttatggtagacttccagacttccgataacacattcctgttttttttggagagttccactaggcatttctccacatggctatctacttaggctttaaaaaagtttctatccttggatttgttttcatctagtccatatccaggtagaaaaagatgtgatcaaaagatttcattggttctgtttgctgtgtcttctttctggtctcgccttattctaccatggctttataactgtgtgtcccagtgtggtttgttttgaagctttctcctccctggggcatactgtcaaaattcatttatagtgacccacacttagattttcttttgtaagtcttcaaatattttgccattccaaacactgccttaaacctactaaagactctctatagtctctaagggacacatgggagaaacatcactggtatacccttcttgacagatatgtaggtgaaagataagaaaataaatcagcaagtggcggttgctctttcagcagccctgctttctcagactttccaaactaccaaaatgaaaaaaatacagaggaaatatttagtgcccttgcttttccatgtgattatatatctggtaaaatttggcatatataatatgtatgtttaatttccctcctatttttaatatgagatgaaatgtaatacatttgaattatgacaacatcaagaggttatttagaccaaaataggttgtattatatacaaaaataatggcaaatgttatgaattgtctctagtatttttttttaacgtgtgttttaaaattgaattggttgggagactatttgaatgtgctttacttatgtggaaaatatcatcgtttactatttttctgcagatccctcactctagcccctatacacataaacaccaaataatttgcttccattgagttagcataaaaatcatcagggcttcaggataaatacccttaaagtaatgcctcagaatgtgcctttttgtggaaaaggttaatctagcctattattggcatcattagaaaatcttgaaaatagaagttcacagtttctatgtgaagtgctgcattaattatgcagcgagagtacacctaaatacaggaggtgctcacatttaggagtagtagccacagttacgcggtgttacactagctctacatttgcacacatgctccttgttttgtttattataggctttccttagagaataaagtgttgcaaataaatattgcatgtgtatgtaggcagtttttgtttaataggtattagagtaaatgactgtgaatttgttcctaagaatcttctgtgtaaaaagagataattttatcatcttatcactttatctctaacattaaaatggtaatctttgcatgacattatttacttgcgattgtgtagaccctgaaaatagtgtatattatatctataaattattgtaaggaatattatattactgaatgttcaacactaattatacttttatctccaacttctttagagcttaatgtattgatttatttacacttatagcttctaacaaggtatattctaaaaagtttttacaaatcaaaaaatttaactagtttcttaatacacaaaaagcctcagtacaaatgacccgatgaccttaattcccaggaaactgtcacattacttctttacccctttgtctagcttaacaatgtgacccaaaatactgcggagctttaaagtttctcagcattgtaaggtcaagctttggtcaccatagttacagtttagatctgcaagtcagaggtcaaatagattaatgatgtcagacacatctttaagtggttctaacaccacttcaccatgcagtaaacagctgagcatattcgatatggcaaaggtattcttcagtcttgctaataagaatatctttggagatattctttttctgatagaaagatttttttataagaacttgcaatattgggctgtggcatcagcaataatagttggcttttagatttgtaatatcagatgcatattgaaaagtatattaaatagctcagatttacacttttctgcacgtctgtgttttgtctgtcataatcaaattgatcatccacctatttataaataggtatcctcactcccctattaatttatggctaaccatgacagtggaccgaaaaaaacaagctttttgattaggagtttttgctttttgcgtgtgtgaatggcacatctcttttctcccaatttgggtagtatgcgctttaaacagaattatttagaaaattgtgtttgggaaatctttctcacattagagagcaggtaattatccatttgtattttatatccaaatacctttatttatagcctaggactctttataaagatcatgggttgtatattcactttttttgtcctaaaaggaaattatttcctcccttttgaatcagaatggaaggagaaaaaagaaactattttacagtgaacgttacttctagaaaaattcaaatgttattttttacaaataaaaaatactctatagataaattttaatcaaaaatcacagaaatacaaataagacaaaaatattaagtgaggtgaaattgcaattattaataaaatatatttaagcaaaaacaatcatcagaattttactatagaatatatatatttaaagctttgccagtatggaattttgcagccagtagacagaattatgtttaagcagtaggcttaggttaagctaaacattaaaggataccctgtttctgaaggttttgtttcccatgtgtattttgtgcagctgtaagattttaagcttgctggagcatttgctcttgatcacatactataaaggtagacaaaggggagaacgaagaggtttggcagctgggaggtgttattatggaatttaatagcaaagaagatgggggttggggcttttctaggtgaaacagagattggcagctgggaggaggaaataagtcctggagtctgagaagagctagtagttcagttgcctgtgagtttcaaatgacaagctagctttcatgtgaatgaatggattgtctccggttttgcgttcaattcaatggaaatcactgccttgtagatatcgtggaaaccaacaactcagcaaagacattaattgctgacctgttttgcagcacttagggccattggttcaacaaactgatggagtattctgtttggtcattatgccaggagaatggcaaatcaatatttaactaccttttgaagaagctacaccactgaaatgctggttttgtataaaactgtttacacataagagtgtcctgaaatgcaagaaaaatgattttattctaaatgtagaaaaattttgtaatcaaataaaatatcaggttgagttctgactttcagaatctgaaatagtattatttctgtaaaaattgccttatgccttgcttttagatttcttgctcctgatgcattgttaaggtgggtaaaccaaccaatacttaatgtctaaatatttatttatcaaaaatatatgaaattggagatattacattttatttactcttcttccttaaagtctgcttttcttgtctacttcctatgcctttttatttaaattttttcaatttacacctttacacttttgctagtgtcgtgaccagaattgtacatatattgctactgtagtgcattagtaatagtttccagtccttggtgcacatgaaaatcatgtagtgaacattaaaatcacctgagcataatgcccagacccacccaagaccagttgaaataatgtagtgaaaagaatgcaccctgtggggatgggtgtagtggcttatgcctataatcccagcactttgggaggccaaggtgggaggatcattgcgccctggagttcaagaccaacctgggcaatatagtgagactccgtctctacaaaaaattttaaaaacattagccaggcatggtggcatgtgcctatagtcccagcttcttggagggctgaggtgggaggatcgcttgagcctgggagattgatgctgcaatgagctatgatcatgccactgcactccagcctgggtgacagaatgagagcctgtctcaaaataataataataataataataataataataataataataataataatgtaccctttgactctttggaaccatacttccctttggctctggttttctcacataatagccatgtgatattgggaaagttacctaacctccctgaatctgttttcttatctataaaaggcaataatattaatactaaatttgaaagatttcttgtgaggattttataaaatattggcataacttccagcctaatccctggcacataggagacatccagtaaacaataataaatatcactgtctccaattagcttgctgtgggaccttgagcaagtcactcctagccttttctggccccatttctttacctatataatgcagctgtaatacttgtcaatctcagagtgcttgtgagcatcaaattacagatgtgtgttgaagggctttgaagaatagagagcaatatagtaaagcaagatgtagcttgtactcttattgctaaggctcctagttctaaggctcagagaaaacaccatcaaaatttgaaactgtttgtgggcattcaatgcttcatttatcattttctcagaaggtttcctgggatgctctaatgagttgcagaccacaccatcactcctgtgttattgaatacttagagtgacaatatccatgaagatttttcaccaccttgtcctgtcactgtttggaatttgtctcatcactatctatcatatagaattaatgcagacttgaggattttccttagctttttgcaaccctgtgcatccctcttggctacaaatacaatttctgtagaagagacaaatagccttgaggctgctccctgcctcctttctgagctgatcttggtatttcttcacgtgcagatctttttagaagcccaaggagagagtcagatgccaactaagttggatttggctagaattgttcacctattagcattttgctttacttaattcacatttgtatagcccttagcatgttctcttatacttacagactttttttgcaatgagtataactttatgttgttaattcacttttctgtggatctgtgtcacatataaagtaccatgtcaaatattgttagagcttagtagttaccttcgagtctgtaaaccaacagctctgtgattgaccagaagtcggggctccaagtaatagaatttctttgttttccagtagtattggacatcagtccatgatgtgcattcataagagtgcaggctgtacctgcagtgaaataattttgcatgcattttatattttacatagcatatatagtagtggttctcaaacttagcatgcatcagaattacctggagagcttattgaaagacaaattgctagaccttacctccagagtttccatagtttattagttttagcgtgggacctgagaatttgcatttctaacaagtttccaagccctgcaactgctgctttggggacaataatatgggacccattaatatggtgagtgctaaggtgcactacacagattcccttttgagagtagagcattcatttcctaactgcaaggggtactggctgtcatggtttccaggccctctgggagttgccctcagttgatgggcactgcctcacttaaaactccatttctgtccctagttgtagctcacataaaatgacaggttaatgcagggagtacaaaggcccatccttcttgcttcagttcaggataactgaggggccaccccagctcagaggcctctgctgcaattgcatcacagctcagcttttctctacttaatctctcttcccttactcccaagagcactctctgattaacctgtgtctcaaagtcttttccagagaatttggcctgcagcagtaggtaataaaagagagttgtatttgttaagcacatatctgacagtaattaaatatcacaactccttcttgtgtagaagcatgaaggagtttgtggtggtttatttggtaatccatgaggccggagcccttaactactatctctcctatgcttcagcatgtcagtcctcctctttttagacatatttggctattgtcttccttccagttcatcagcattcttgttgcagaagctttcccacaatagccatttttagagtacacatttgctccatttcatttacaacaaatatttttcaagacaaattccatgcctctcatgaagcaggttgttgttcttcagtgggttagaagtgggatgattcctccaaatctaccctagaatctcagatgcttttctccgagcactttccccaataataataatgactagcattagtgcttcatatgtgccaggtacttgactaagtactttagagatattaactctttgaatcttcataacaaccctatgaagaagatactattattcttattttagaaaacaaaacaaaacaaaatgataggttaaataacttaccagggtcgtataattagaaagaggtggagccacattttaaatccaggaagattggctccagaatctgtgcgtttcacctgtatgatgtgctacaaattttcccatctgtgttatcaggtggcagttatgacttttttgttgacataaatttttaacagctttattgaggtgtaatttacatataatacagttcacccatttaaagtatacaattcgatgggtttttgttcattacataattaagcttttaattgtaagaaatatataaataaaatgagctattttaaccatttttaagtatgcaattcagtgacaataaatactttcacgatgttgtgtaaccatcagtagtacctattcaaacctattttattagcacaaatagaaaccctgtaatgagtaaacaataattccccatttttaccttaccctcagcccctggtaatctctaatctactttctgtgtctataaatttgcctgttctaggtacctcattcaagtaggatcatacaatattcattcttttgtgtctggctcattttgcttagcacaatgcttttcaagtttatcaatgttgtaccatgtatcaaaatttcactcctttttaaggctgaataatactctattatatttataggccatattttgtttatttattcatctgttggtagacacttggattgtttctaccttttggctatgatgaataatgtggcaacgcacattattgtacaagtatctactttcaattcctttggatctgtacctggaagtggaattgctgggtgatatggtaattctatgtttagtttttaaggaactactttaaaaaccattacattttctatagtggctgtaccatttacattcccaccagcaatgtatgagggttcaaatttttccatgtcttcaccaacacttttcttctgtttttggttttagccatcctagtgggtatgaagtgatatctcattgtggttttgattggtatttcccaaatgattaatgatattgagcatcatttcatgtgcttatttgctatttgtatgtcttctttggagaaaagtgtgttcaagccctttgcccattttttagttgggtagagttctggatatttaacactcatgtgatatatgatttgtaaacatttttcccatttaataggttgtcttttcactctcttgagagtgtccttcggtacacagagtttttaattttgatgatatccaacttgtctattttttcttttttgtgtgtgcttttgttatcctatctggtactcaattgccaaatccaagatcaagaagatttgcccttatgttttcttctaagagttttgtagtttaaggtcttatatttaagttgttgatccatttggagttaatattagtatgaagtgggagtccaacttaattcttttacttgtggaaatttagttgtcccagtgccactggtggaagagattattctttctctattgactggtctcttcatacccttgccaaaatcccattgaccatagatgtgtaggtttattttccagactctcaatctgtttcatttgcttatatgtctgtccttatgcctccattatactgctttaattattgtacctttatagtgactattgaaatcaggaagtgtgagtactccaaccttgttctttttcaaaactgtttttcctattcagggctcttttagaatttactatgttatgcttttgtacttatcagtattcagtatttatttgtccaggcttgtattttctcttttattttgtattcacatagtggctatcaccttagaaagatttctttgcaagctgttagctaatagttcatctcctgatttataactctgctagtacaagtctatgctttcttaaacacagttccctaatccaaaattaaaacctgtcctgaccagaagctttttggaacagagactgatctggattgatataaggttattttgccttttaaaaaaatcttacctaatatgaatattcatatcttttacagtagaactattcatatatttgaatagactaagctatctgagaccttacaatggatattatatattgcatgtaaactgtattttggtttatttcccttattaaagtgaagtgattctaaatcttaaaacacattttgccctaaggatttcaaatgagtgatcgttgacctggatttttatttttgagatatatcaagaaaaaaatttccaatgaaaatatgataggtcctgtgttagagtagttcttataaaatttagtgatctttgttatgatctttgtttcagttgttatgaaagaatagttgtggtcaggtaaatctttgtggagtaaagcttgatatattgggaagaactttttactaacattatttatcacttacaaggaaccatgcacattataagaaggaagatagtagtagcagtaaaaaatagcagtgagcggtgtttcctatatgaatgtgttgcatgaagaatatgtgtgcttatcccttcatctaagaacagattctttgtctctattatgtttacaccaaaacccaacactaagattttcttcaataaaaagaaaaattctaaattcagccctcctactcccatcctttgataacactctctgccttgactggcatcaagtctacttgttgaattcacactctcaagaggacaggaagaaagacagacagataagagagacacttgtctcaatcatatagtttcatgaactaacaggtttttgaagtcctggctctgaagaacatggtcattaggtttccaaaatcaaacttgggcaataaaaaggatattgctttgtttgttttggtaccacatatactataatgggattgatttttttttttttttttttgagatggagtctcgctctgtcgcccaagctggagtgcagtggtgccatctgggctcactgcaaactccgcctccagggttcacgccattcttctgcctcagactcccgagtagctgggactgcaggcatccctgccacgcccagctaattttttgtatttttagtagagacggggtttcaccatgttagccaggatggtctcgagctcctgaccttgtgatccgcccgccttggcctctcaaagtgctgggattataggcgtgagccaccgtgaccatacaggattgatttttgaaaggttaatctgggccaggcgtggtggctcacgcctgtaatcccagcactttgggaggctgaggagggtggatcacctgaggtcgggagtttgagaccagcctgaccaacgtggagaaaccctgtctctactaaaaatacaaaattagcggggcgtggtggttcatgcctgtaatcccagcgactccggaggctgaggcaggagaatcgcttgaacccaggtggcggaggttgcggtgagctgagatcgtgccactgcactccagtctgggcaagaagagcaaaactccgtctcaaaaaagatataaataaataaataaataaataaaaggttaatctgaattcttttttaggggtgacctaccgatttgccaagtattctatgttttcaaaaaggcagcctgagaaatttcctgacttcagttattcttgaaccaccttcagaacttttaccataactgagtaatcttttatgatctttcatgtagtgctatatttgttatcttgcttaaaaaaaattgcatttaactgtcgtaaaagaaaaaaatcaatattttccaaataaatatgtaacaactaaaattaaaaatgtacatatgtttgctacctaaaatcacctcagaaaccactggaaacaaatgcaccacacttttgggaacactgccctaacgctaagtctcaaaaaattgatgcgttcttcaagaggatgtaagaattggagggaaaagccacaaatttttcttttaagtctgggattaaaaatgcattcttgctttcttagtttaaaaacaaacagctaagtaccaattgaagggaccaccatggaagtccacatatagtttctgcacttgtcattttatagaagcaatctctacatctccgctgccccagactgaaaatttttagagcagtaatttgtcataaccgttttttgtttttttttttgctttttttttggaactccgtgacgataggaataaatagtaaacaaacaaacaaaaacttgtgcctcttgttccttcgtgaacactgaagttgtgaataaaatgataatgtagagtttgtaaatattcaaatttggacttctgtctttcatgttaaattgccctaggcacttggactcaatttcagacattagtcatctgtaaaatagaggactgacgatgctagccattgatgccaaagggatagaaagactttatgcatatcgagttctagaatgacatagttggctatgtaaatcagtttgcctgatttatcataacagtgcatttaaatacaatgttcatgaaatattacaacttgtaattagaaaattgatgttggttagagaaattgtgttgactttgtcttttctaaacacttcagaaactttatttattagctttagaggtagatccttcaattaagctgacttaaagaggtaaaatgaggttattgttagaaataaaaaccaatttttcattaagttcaattaagttcagtttctcctttattatgcttgtatttaatagaataatttatgtggtatttccattaaatcatttaccagggttttataacaatatgttactagtgtttggaaatataaatacaaatctcttataattttcaatttgtgcttatattaaccattcatttcttaagctttgatcatttaaatgctttatttactagttttcatatgcttcttgtaaacctagtctcacattaagaggatgcttaaaatgccaaaatgccctggtaaattaaaacgaattcatcgtatttcttacattacttaactctgatgactacagtctagttgatacttgtaggattcaaattcataaaacctgagatattcagatcaaggagaggatagccattgggaaatgagttttttattcttatggaactgaaaaatgcggtatcacttgaaattattagtctaaagtttgccttcacgtgactaatattgggaaaaaaagtttttaagaaaactttggaaaatcaacacttttaaaattttatatttggcaccagacataattggcactaagaaaggaaataactaaagttgtgttaagataaatacaaatgttttgtttccatcttaagaagggtttttgatgtcctctggtgtagatatttactggagagaaggctattgccaatctacattccattgcagttgattttaaaatatagagctaaacaggaaatgtcatgagtgatgtgaccatctgccaagtgtaaatggagtctgagcaagtggatgtaatctgtactaaacaagcaaatgcgttggagtacagcctgaaagatttttaaatcatgaagctacaagcccaatatataatgtttattttacatactagtaattcttgtgcaattgggtttattgtaactcttgtaacaactgtgataatttttgctaagtgaaattaaacagcatcttattccagtttcagagtttccatctgatatactttagagtgcttggaattctttggtagttcttttctgaaatccttaaagttctttccctgccaagaaacctgttttcacagtaattataaatcaggaatgcaggtaagaggaaagaagaaacacaaaagggtgctttatgtaatcccacccctctgctctgttcaaaggtgccaaaaagaaatcagggattgttaaaactcatactgaaggatttatagaagccatcaaattggggacaagttacaatgaaaacttttcattgtaaatgcactcagctaacagcatgatatctcattttaataatcaatggagaaaaagttctttcaggcaaagtgtattctaaagtgatttttttcccttatggaaacatagatagaataatcatttaaataaagctttaggagtaaaatgatacactattattttagttatacatgttatatacatttttattgaaatgtagatggctacacctttatcaaattacagttttattgtttcagtgttgtttacattaacttccattaactctgttgtgattcatagtttaaaatgggccacaaaaattacatttatcatttcacaaatttaaaaaagtatcaacgtcgggctatcctattcctttaatggaccagtttaatgcttagtaacataaccctttaaagtctacatgtcaaagatagcatttttacttgaagaaagtaaacataaaagaactttaaagttttagtatctgtttccttaactgattttaatggacttccaaaacaatcaagggcagtgggtggcctcttacttgcagaagccaatttttaagtgcatgtgtttcttttccatgttgacctcttgctgggacatatttgttgtcttttaaaatgatatttgctaaattagcttattgaaatgctaaatcatgatatgttgcttttcagccatcaatttgaaattccacgctttataaatttcaagtgatttaaaaacactgacttttatattcatgctcagataacaactgcatattacaaatgacttgtaaaggtgtgtggatcttccaataatgattgtattacttgcatgttattagcattaaagaacatgtatcatttacttattctttcatgcaaatgtattgaaggcatgtacatttattgaaggactgctgtatgagccaatacagcgtatttttgttaggtacctaatttgtgtgaggccctttgttaaatgcacttaatgccatatattatttagttttcatcataactttgatgtagtatactgtttttatcttcatttaccaaatgaggacatgaagacaataaagagactcacccaagaacatatttttaggaagtggtggtttaatgatggaaactctcatctgtctgactttatgtacagctatggtgcacagtagcagtctataaaatctatcttgtagaattcatggttttctaaaatactactgtggtgatgatagttttctctctattgaattctgccatactctacccacagattctgctttctcttctctgatggcaatatagtttggatatttgtcctcatgcaaatatcattttaaaatgtaatccccagtcttggagatgggacatgatgggaggtgtttggaatatgggggcagatcactccttaatggcttgggccatccccttagtcaaaagtgaaccctcgctgctctgaattcataggacatctgatcatttaaaagtatgtggcacctcttttctctctctttctctctctctcttgctcgcttctgcttttgccatgtgacatgccagctccccttttgccttctgccatgattataagtttcctaaggtctcatcaggagccaagcagatgcccagcatcatgcttcctgaacagcctgcagacacatgaatcagttaaacatctcttcattataaattacccagtatcgggtgtttctttgtagcagtgcaagaacagcctaatgtagatggcttttctctgtctcctttgcttcaaatgcagagaggcagtactagagacagaaactgcataaggctatggccttggatgacatcaccaggagtgtgtgatgcaaaaatcgggttgaggctagaaaccggagaacaccagtaatagaatcaaaattatgctttaaggacatgaatctaacagcaggcgtatctccttattgatgttctctgcttactcatacatcattctcctgaatttcttttttgtccatagttttcttcagctttttcaacataagacaattaatttaaagtctttttatagtctgtccaaggctaggcctcctcaggagtagtttctcttttacctgtaaaacagtatgaatgtgccatacttttctgtttctttgtatgctttgtaattttttgttgagaactggacattttgagtatcataatgtagtaagtgtggaaattcttccccctctccaaggattgctgttgttaacttgatgaaagctgcagttgtccatttgtttaacaagttttttctattttttttcaaaactatattctttgtcatgtgtggtcactaaagtctctgttccattatttttgcagtcagccagtgatcctacagagaattccttgaatgcctagatccaataagaaaatagaaaaaagtgtctatctttttaagttcctttgacagctgctttagcccaatagggttgaaagaatggccagcctctgtgcttctgtgccggtttctcaatgaacagccaagcatataaaaacacacaagcacaattgttggaggacaacgtccttattgtccactctagcaccaacaagccataccaagtacatggtcttatctccctatggctgccagcttggagctggggctaaaggatggtagctgctttgtgaaatgccaaaattcattgaaatttgccatgcctctttttccctttacactctcctcatgttgcaagtgtctcaccagacttcagagtctgaaatactatagtttattctgacagttcttgctacctcaactgatttcagtggagacatcaattcttggagcttcctattcaaccgtcatctgtgacataattctattttccttttttccctttggttcattttaaaatttctttctacttttttttataggtgacttttatgtaagtaggtttttttttttttgagacagagtcttgctcagtcacccaggctggagtgcagtggcatgatcttggctcactgcaagctccacctccagggttcatgccattctcatgcctcagcctcctgagtagctgggactataggcgcctgccaccacgcccggctaatttttttttgtatttttagtagagacagggtttcactgtgttcgccaggatggtctcgatctcctgacttcgtgatccacccatctcagcctcccaaagtgctgggattacaggtgtgagccactgtgcccagccttatgtaagtagtttttattaatttggaattttaagtacacttgactctgaataatgtggtagttgggactctgatgtcaccccacacagtcaaaaattcatatatgacttgattttacaaaactttattaatagtctactgttgaccagaagcattactgatactgtaaacagttgattaacacatatttgtatgttatatgcattatatactgtatcgttgcaataaagtgaaacaaaatatcacaaagaaaatcatgaggaagagaaaatacatttacaatgctgtactttatttgtccgtaccataagtttacattgccttttcagaaaatgaattgtctgtcagaactagcaggccatctgcagccgcagacctcaatctatggcacatctcaagcaattctatttttttttaatgttgtgacttctctgcttcttgcaaggacttccggcatcaccagtggcattttatatgggtcccatggtggttattcaagatttatggtatcacactaaactcagtgaaaaatacatgagaactgagacacagagagagagagcagtttttgtttttcatttttgagatagagtctcattctattgcccaggctagagtgcagtggcgtgatctcggtccactgcaacctctgccttctgtgttcaagtgattctcctgcctcagccccctgagtagctaggattacaggcaccctccaccatacccagctaatttttttgtatttttagtagagacggggtttcaccatgttggccaagctggtctcggactcctgacctcaggtgatccgctcgcctcggccttccaaagtgctgggattacaggcgtgagccaccgcggctggccatcggccaattattattattattatttttttaaagagatagagaccagcgtagccaacaggcgaaacctcgtctctactaaaaatacaaaaaattaaccaggcatggttgcccttgcctgtaatcccagctactcgggaggctgcggcaggagaatcgcttgaacccggcaggcggaggttgcagtaagctgagattgcgccactgcactctgacctgggcgacagggcgagacttggtctcaaaaaaaaaaaaaaaaaaaagacatagggtctccgtcaattgcccaggccggagtgcagtggcatgagagagatcacttttaccatgacgtgcaaattatgggagagataaactgttcacatcgagatgattggccacactatgttttaagaagatacttgtaacatttgagctcaatgcaggggcaacgggagctggctatgaaattatgataatggtacagtgtacactacagttaatactgcatttttacatttgcttatatttctctcaatggcaaatggcaccatgtacaatctattagtgttaaattttaaccataagcatacttcaaaataataagagccatatatgacaaacccacagccagcatcatactgaatgggcaaaagctggaagcattacccttgaaaactggaacaagacaaggatgccctctttcaccacttctatccaacatagtactggaagtcctggccagggcaatcaggcaagagaaagaaagggcacccaaataggaagagaggaagtaaactatccctgtttgcagacaacatgatcttctatctcaaaagcatcatagtcttagcccaaaacttcttaagctgataaaaaacttcaacaaagtcttaggatacaaaatcaatgtgtaaaaattactaacattcccatacaccaacagcagtcaagctgagatccaaataaagaagaaactcccatttacaattgccacaaaaagaataaaatactagaaatacagccaactagggagttgaaatatctctacaaggagaagtataaaccattgctcaaagaaatcagagatgacacgaacaaatgggaaaatattccatgctcatggataggaagaatcaatataaaaaagaccatactgcccaaaccaatttatagattcagtgccatttctattaaactaccattgacattcttcacagaactagaaaaaaactattttaaaatttatttgaaaccaaaaaagagccagatagcaaaggcaatcctaagcaaaaagaacaaagctggaggcatcatgccacctgacttcaaactacattacagggctacagtaaccaaaacagcatggtactggcacaaaaacagacacatagaccaatggaacggaatagagaacccagagataagaccacacacctttaactatctgatcttctacaacctgacagaaataaacaatggggaaagattccatgttcaacaaatggtgctgggataactgactagccatatacagagattaaaactggaccccttacttataccatatacaaaaattaactcaagaatggattaaagaacttaaacaaatgtacaagaaacaaacagacaaccccattaacacatgagcaaaggacaggaatagacacttttcaaaagaagacatacatgcaaccaacaatcatatttaaaaaagcacaacaccactgatcattcaagaaatataaatcaaaaccacaatgagataccatctcacaccagtcagaatggctattattaaaagggcagaaaacaacagatgctggcaaggttgtggaggaaaaggggcacttacatactgttggtgggagtgtaattagttcaacaattgtagaagactgtgtgatgatttttaaaagacctagagacagaaataccatttgagctagcaatctcattactggctacatactccccaaaatatcagttgttctgttataaagatacatgcacatgtatgttcattacagcactagtcacgataacaaagacatggaatcaatctaaatgcccatcaatgatagattggataaagaaaatgtggtatgttacatcatagaatactatgcagccataaaaggaacaagatcatgtcctttgcagggatatggatggagccggaggccattatccttagcaaactaacacagaagcagaaaaccaaatgcctcaagttgtcacttataagtgggaactaaatgatgagaacaaatggatacacggaggggaacaacacacactggggctaatcagaagctggaaggtaaaaacagagaggatcaggaaaaataactaatgggcactaggcttaatccttgggtgatgaaataatctgtacaacaaacttccatgacacaagtttagttatgtaacaaacctccacatgtatccctgacttaaaataaaaattaaaaaaatttagccttctataagagatctgtgtatattgtagcaacatggatgcagctggaggccattatcttaagcaaattaacccagaacagaaaaccaaatattgcatgttctcacttgtaagtgggagctaaacactgggtacttatggacataaagatggcaacaatagacactgaggcctactagatgggggaaaggagggaggtggacacgggttgagaagcttactattaggtactatgttcactaactggatgatgggacatttgtaccccaaccctcagcatcatgcaatatacccatgtaacagatctgcatatgtactccctgaatctaaaataaaagttgaagtcatttaaaaaaattaagttttctgccttaggaatgcgacttctttttttttcaaagtaaaaataacctccatgagacttttcttttaatttcatttgttattctattcccatagaatacatttttatatttcatcaactccatatagactttctgagtcctaaatggaaactgagatatcttcaactagataattgaacttgatatatttcaagaattgttatgtatttcaaaattttacagatacaaatatttttatactagttccttttgtcctccctcccttccttctttcctttttcctctctccgttctttcctccttccttcgttccttttattcacatattacatacataatatcacttgtatgtgtaaatatatgcagttagacttttctgaaactttatgtgacttcaaaagattattctaattcattatgtagatcaaaaagctgatttcctttgagagggttttaaatattataaatgacttagtatgcagaagctggactttgccttgttatatatgataattaaatacttgatttcaaaatatataaattaagatggaaaattatttaaagattgtgtgaacctattattttaaagttacttaaaaatataatttctagtcatcagaaatattttatggttttgccatgagttaaatattagtccaaaatgaatctacattttgttataatgtatatgcctgtttggactgtctgttcctaaatttcattctccccagctctgtagtcccttagctctattatgtggctcccaatggagtcccaccttaggtttcttatattgacggcaacttggatgcatgcctcttaagctgacccatgcctgactctgccctgtgtatgaatttgtgtctgcttgtagatctctgcagtatagctctgggtcagaagcatttccatagttaacctcaagcctgtgcctgtccagactgtctgtggtacccatggatctctagaatactaaaggcttcactgacatgttgaatccaaactcaccatatattaagtaaaaccaggttgagatcttaaaatgtgtttatcctcccaacagtaagctttttagacccgagaaagtggagagatataagagagagattatcattacagtttagaggagtgtatctcattgaaatattgttaaatgagagctgatcaaaactaagatatggtttcacaatacatgtgaaacacatttaggtcaggagtttagaaaacttctgaatgagcatgttaacaagaatattgatatggagtctctttctttcataaggaatggaggaatggcaaacagaaattaatgtttgaagtcaataacctagtgtgcaagttctttatgatctaactccatttcattttataagcttctttcactgtctaccctttagctatgccaagggtcagaaaattgaatatattctgtcttccttagtgtatttgttttttctccttttcacattttcttaccttagttcctctgcctggaatctctttctgctcatgactgtaagccatgcgtaatatctgctctttcagactcagatcatcatcttgtgcaaagccctcattcctccctttctttcccagctcctctctcccaccaacacagaagtaattcctctttcttcttaattcctactgaaattttggcatgagtataatttcttacagttttatatcatggcttagtctcattattgcttgccatatgtgaggggagttgttatggactgaatgtttgtgtttccccagaattcatgtgttgaagccctaatcccaaacgtgattagattaggatttgagagtctttgtcaggtaattaggttaagatgatgtcatgcgggtggagccctatgttaggattactgtccttataagaagaggaagagacaccagagctttccttctctaccatatgaggacacagagaaaagttgaccacctgcaagtcaggaagagggccgtcactaagaactgaatctgccagtaccttgatcttgtacttcctagtctatggaactgtgagaaataaatgtctgctgtttaagtcaaccaatctatgatttgttatagcaacccaaaaggacgtgtagaggaatattatgtcctatgaataccacagtagttttagtatacatggaatcagtttgtcaattgagattgtgttgaatttatagatcaatttaaggaaaattgacatctttgagttatcaagcctttcaacccatgaagatggagttgctctccatatatttagatcttctttaatttctctcagcatcgctttgtagttttcagtgtataggtcttatatcttttgtcagatttatacctaaatattacatatttttgatgctatggtaaatggaaaaggtttttattcaatgttaaactgcttgttgctagcatgtagaaacacattttttaaatattgctctcataaattgcaaccctgctaagcttattagccctagaagcttttgcacagaatatgtagatcttctacatagttatgttttacttcttcctttcttatatgaatgcctttcttttttctgcctttttttagtgtcttatattgccttatcacaatggctagagctccccatacaatgctgaatagcagcggtgtgaggagacatccttgccttgttcctaatctcaggggtaaagctttcggtctttccccattgggtataatgttagctgcaggttgtttttaaaaaatacataaaatgtgcctattattccaagtttgctgagaagttttatattttccttaatcaggtattgatgttggattttgtcaaatgcttttatgcatctattgatatgattatatgtattttcttatttgtcctgttgatatggtgaattatatgggttgacctttgaatgttaaaccatcattatattcctagaataaactctattgtgtcaaaatatgctatctttttaatatattgttggatatgattaaaattttaagattttttatatatattgattagggctgctgacctaaagctttctttttttaaatgtcttttctgatgttgatagtagagcaatgttgatctcataggatacgtcaggaagtgttccctcatcttcaactttctgtgagagtttgtgtagtattggtattattttctcttaaaatgtctggtggaattcatcagtgaagacatctggtcctggagtgattattgattattagtttgttttttgtgggggaaggtttttaattataaatttaatttttataatagatatagggctatttgtattttttgagcaaggtttggtagttcaagttttttaactaatttgtccagttcatctaatttgtcaaatttaggggaacagagctattcataatattttcttattatccttttaacatatgtaatctgttaaaatgtcatttctctcagtactaatttttgtaatttgtgtctttattttttttcatgatcagttggctagaaatttaccaatcacattgatcttctcaaacagcagcttttgatttcattggtttttctctgtcattttgttttttatttaattcatttccactttgatattcagtatttattttcttctgctcattttgtgtttcatttactcttctttttctggtttcttaaagtggcagctaggtcattacttgatacatttcctcttttctaatataaatatttagtattacaagtgttcctctaagtacttctttagctgcaatccacagatgttggaatattgttttaattttaatcaactgtacatactttctaatttctcttttaatttcttctttgactcatgggttatttagaagtgtgtaatttagtttccaaatatttgaggattttccaagcatctttctgtcatggattttttatgtttatttttgtttttagagacagggtatctctacaatgcccaaggtagactacaactcctggactcaagtgactgttccacctcagccttccaagtagctgggactacaggtgtgtgccactgcacctgctatggatttctaatttaacttcattgtgataggacaatatacttagtatgacttaaatccttttaaatctattgagacatgttttatggtccatggtgttgtttgtcttggtaaatgttccatgtgcacttgaaaaacatttgtactctgctgttagtgagtagagggttctataaatatcaagtcaagtggttgatagttttattctatatccttactggtttttctctacttgttctattaatcattcagagaatggtgttgaaatctctatcattgtggatttgtgtatttattcttgtagttctatagtttttgcttcatatgttttgaatctttgttattaggcataaaagtctaggataattgtctccttttgatgaatgaatccttttatcatagtgaaaccttctttattcttggtaatatcattttctctggaatctacttttatagccgttccgattttcttgtattagtgttagtatggtatatactgtgacattcttctaacttttttgtgtctttacattaaaaggggattatctgtatcagcctatagtttggtgttgatttttaaaatccaatctgggctgagcgcagtggctcacgcctgtaatcccagcactttgggaggctgaggagggcggattacgaggtcaggagatcaagaccatcctgcctaacgcggtgaaaccccgtcactactaaaaatacaaaaaattagctgggcatggtggcgggtgcctgtagttccagctactcgggaggctgaggcaggagaatggcgtcaacccaggaggtggagcttgcagtgagctgagatcacaccactgcactccagcctggacgacagagcgagactccatctcaaaaaaaaaaaaaaaatccaatctgatagttgttaatttttaattggtatatttagaccatttactttttttttttttttttttaattgagatggagtctcgctctgtcgcccaggttggagtgcagtggcgcaatctcggctcactgcaagctccgccttctgggttcacaccattctcctgcctcagcctccagagtagctgggactacaggcatgtgccaccacacctgggtaatttttgtatttttactagagatggagtttcaccatattggccaggctgatcttgaactcctgacctagtgatctgcctgccttggcctcccaaagtgctgggattacaggcatgagccactgtgcctggctgaccatttacatttaacataaatattgatattgctgggtttgaacatacatcttgtttgttttatattgttggcttattaattataagtcctttatagtggttgcttatagtgtgcacatttaacttatcccagtctactgttcaaaaataacattgtagtttatgtatgtaacaagctcttaaaatagtatattttcatttttctcctttggctatgtgttatttttgtcacactattatctttacataaattgtagaccctacaatacatcgttataaattttgctttaaataatcagttatctttttccctttcatttttagttgatacataataattgtacatatttatgggacacagagtgatattttcatagatgcatacaatgtgtagtgatcaaatcagagtaattaggattacaaacatttattttttttgtgctgggaacatttgaaattctctcttctagatttataatatatacaataagttattgtcaactatttttctccacagtgccatagaacactagaacttattcttttctagctgtaattttatatctattaataaaactctgtcttctcctccctgctacatttcccagcctctagtaaccataattctactctttccttctacttctgtgagcttttttgttgttgtttccacatgtgagtaagaacatgtgttacctttctgtgcctgagttatttcacttaacataatggccttcaggttcatccacgttgccatggatttttcattttttattgataaatagtattttattatacttgtgtgtgtgtgtctgtgtgtatgtatcaatcacatttgctttatccacttatctgtggatggacatttagatgaattacgtatcttagctattgtgaatagtgcttcaataaacataggtgtgcaggtatctctttgatatattgatttactttcttttgaatgaatacctattaatgggatttctggattatatggtagttctatttttagttttttgagagatgtccatactgttttctataatggccatactaatttacatcccaccaacagtgtgtaggagttctcctttctccacatccttgccagcatttttttttttttttggtctttttgataatatccattctaactggggcgagatgatatctcatgtagttttaatttgcatttccctgatgattagtgatgtggagcatcactaaaacaaatttgatgtttaaacttgttgggcatttgtatgtcttcttttggaaaatgtttacttagattctttgcccatttacaaatgggattattttttatttgctatcaaattgttggagctccttatatattctggatattagttccttcttggatgaatagcttgcaaatattttcttccgtcctacaggttatctctttactatgttgattgtttcttttgttgttaatagtcaattatcttttaaaggtatttcaaaaataggaaaaacatctggtatatttatcatttccagtgctctccattcgtttccatccatatttccatttagtatcactttctttctgtctgaaggtcttccttttatattcctttttttaaaattaaacagcacgccctgttcataccattcctttagatttcttataatgtagttctgttggaagtaaacccattcagcatttatatatctaaaaaagtttttatgcctcaatgagtattttttttttttttttgaggtggagtctcactctgtttcccaggctggagtgcagtggcacgatctcagctcactgcaacctccgcctcccgggttcaagtgattctcctgcctcagccttccgagtagctgggactataggcacacgccaccacaaccggctaggttttcttttgtatgatagagacagggtttcatcatgttcgttaggctggtcttgaactccttacctcaaatgatccatttgcctcggcttcccaaactgccaccgtgcctggcctgaatgagtctttattttatcttttttaaaaagacattttactaaatattaacgtctatgttgacaggagttttttctttttctatgctttagatatcccttcactgtttttggcttgcatttttcatggagaagtctgctgtcatttttatctttgttacgtaagatgtaatttctctctagctacgtttaattttgtctttatcacggtaaataatttgatgataatttgctttgttagtgttttcttcatattgcctgtgcttgtcgttcttgaatttcttggttctgtggatccatagttgtcatgaaatttgaacatttttctctgttgtttttccaaataaattttctgcccctccctgactttggggatgcatattaggttgtttacatgcatgcatattaggttgtttaaaattgtcttacagctcactgatgttctgatcatttaaaaaaattcttttccatcctcttctctgttttattttggatagtttctgttgttgtgttttcaagtttactatttttttctgtcttatctaatttgtttttagttccacctactgtatctttaaatgtcatatattgtattctcagttctagaattagatttttaaaaatctttcctgtttttatttaacatgcttaatctttcttctgtctacttggatgtacagaatatagttacaaagatttaatgcccttgtctactaattttctcatttctgtcctaagtatttgtattgattaatttttctccttgtaggttgtatttttttcttgtcttagtaagcattgtaattgttgactggatgagagacattgtgaaatttataatattgggtgctaaatatttttgaatccctatcaatatcttaacttttattctaggattcattggagttactggaaagtagtttgaccctttcaagccttgcttttaaggtttgttagacagtaccagagcagattttattctagggctaattttccccactactgggtttaataccttttgagtactctccctgatgacccgtaaattatgaggtttttccattctggctaattggaacataaactttccccagtcatgtttgaatgccagatattattcctctcaggtagttttatcatatgcatgtgctgatcagtactaagctgaaaatacaaggggatactgcctgtaaatcttgtagctcttctgtatatcctttcaatattctgccagtgaactacagctgtcatggcatttctgggtgccatactccatttcctcaactttaaaagaatgtctggatctacctccgttcctcctccctacactgtcatgtggaaaatgtctccgggcagcaagatggggcaatcctagggctgattttatttgctgcttttctctcagggatcactgttctgtactgcctaatgtcctatgtcttgtaaatcttgagtcatatatgttgtcttatatttttagatgcttcagactggagtgtatatctggttcctgttattctatcttgtccagcagtggaagtccttttaccatatttatactctactgtgagtcataatgatctatattaataatatccattagtacttatgatgttaatggtaaatgttctttggtgtggtaatgccatatgatttgctatagactatcatcattacagagatgcaggctgtatccacatcggtctatacagacttcaaccgacttggttgaagtggctggtcaatttaaactcttgcctaattctatcaaaaactaattttcgtgttcttcaaatcaattaatcattccataaattaactaaattgagcagatttctgagtatacgtgtagtctagttatattatttatgccaagggatagttctggaaactgcatatttccattccagtaggttgattccatgtgtttgctattgtgaatagtgctgtggcaaacataggtatgcatgtgtctttataatagaatgatttatattcctttgggtatatacccaataatgggattgctgagtcaactggtatttctgtctttaagtctttgaagaatctccacactgtcttccacaatgactgaactgaaagagcaaattttaattgttactgtatgctttctttactgcctgaaatttttgtttgtgtattttacataaataaataaatagaatcacacagatattgtatttttttccattaatccaaatatgaatctaaataagtcacacttatttcttcttgggtgttaattgccttttttgacaaccattcatccaatcagtgtgtttattctgaattgactcaattcaagtaaaacactcagcatgtgatttcctttttctttgtaagtcccctgtcaacactgatggatgtcattgtgaaaaggcatctcatggtggttttgttggttcacagatctgtctgtttttttttccccaatacaaatttgagtctgccatcatatactttagtttcatctttgttgtaatctagattataattgttttatttcatatttatttccccttctgctagactatcatactgatcttgtatgggagagggtgtgtcagtactgttgcttcctgctttagatccacaaattgaagtgccatccaccagctgttacattctctgaacaggcagcttgccaacaaaccagagattttctgatatactgcaggctttgtcaattattttaatatacttagatatagaaatattttcatggtacagagtatgtattagctgttttccttgcatcaataaacagctattatagttcaattataagtgtatgtgtatgtgtatgtgcatgggtatatatgtctcatgctcagtgtcttctggctttaatttgttgcctggaattaaaaattatgaactctgaggagcagtggcttttttgtgttagtgttgttttctaaaacacttaagttctggttgtagtttatgcaatttttagttgctttgaaaatatgacacagaaagtgttctggaataaaatgtacccaagagaattgtatttatcccattcatttgctgctcatccttaattcttgccttttcatgatctttataaacacattgctctaaatattctagcttgggttttcttagattaagcattttatgccagtggtggtaaaactgaaaaggaaggttcacatcataggggaaatgtatgtgtgtacgtatgtatgtctgtgtctgtgtgtgtgtgagtgtgtttgtgtatgtctgtggggttttgctacaaaggttaaatcccagaaatgttatgatagtttatagaaaatgtgtctcagttacagctgagttaaataagaaccctgaggtaatgctctaagaaaaatgaacacttgatgcccttttctttagtgtccccttagagttgcctaataggatcttagtgaactaacaatcataaacagaccaatagaaagaaaccttcttccttagaggaaaaacagtttcagagtcttggggtattcagtttgctcatgttgttagaatagtttcttttgccaaacactgaacattggggctgtgttttcttgttcaagaaggaggaagaggctatatgctaatgacagaaggcagctacttgcatgggtaatagactcaaaggaatgtaaatggctttcataaggcaaaatatctcgtgtataaacacttcaaaatctagaactcatatttcattaacaaagatattatttccttgtcttatttaaaactcacaagatattttaaaaattatgtttgatattgggatattaaagaaattcttttattttggaattttctcaagatgagacaaatgtagaattatgcatttgtttaaataccaatggaaataaaaaaatcacttctaaggggtccataaacaatgcttattgacttactggctcattgtacccccaaacactgacattgccatgtcactggatgatttttcattaattaaggaaaaagccaagtactttatttacaaaaaattgttaattttgacattaccttaatgtctttttacagatgtaaggcattttacacatccccctgccctcaattatttggttggctttattttaaataaaaatcaagggatggtattttttttaaaaagcccaaagtatataaatgtgaaactcttcagtaaatgatcagaacttaatatccagtttgctattgaaacattacaaatcactaactataaaggttgaaatagaattgcagcatcagaaataatattttagctttagaaatacaaaccagaaatacaaagcagaaattttgttgcctgtaaaatcagtactacatccttttatggaatagaagatttctttttcacagagtattctctggagccaaatacctgggttgtcaaaaatgctgcaaaatgagaatttagtttacagtagttgcaattgggcagtgtaccctaattgacttggaactagaaatctattaaaaggaagcctattaaccagatctcaaaaattcctgtagataaagctctagcaaatatgagcttacaatcaaaattcataaaacatgcaagagcccaagataccctaaataatataactattggaaaaatcagatatagaataaaaatttatatgtttaatatgataaaaaataattaggggagttgaaaataaaagtaagtaaattagaataaccagttaaattggacaaacataaacagaactataataaattgaaagtataataattgaaactgtagatcagaccgtggaatgaaaacatgagtgaattagggaaatatagatgtgaggaaattcccaataaggcagaagagaaagatagagacacaacacatgaaagagagattaaggtacattaaatatagatttagaatatatatctagtcagagttccagaatgagataataagagaatagggtagaggtagtatttgaaaacataaaggctaagaattttccagatatgattaaggaagcacatgtatacaaagcaagagaagtcaagagaaatctaatggggcaggtgcggttgctcatggctgtaatcccagcactttggaaggctgaggtcggcagatcacttgagtccagaagttcgggaccagcttgggtgacatggggaaaccccatctgtacaacaaataccaaaagtagctgggcatgctgacacgggtgcctgtagtcccagctacccaggaggcggaggttgcagtgaacagagatcatgtcattgcactccagccggggtgacaaagtgagacccccatctccaaaaaaaaaataataatatattgaaaccctgaaaaaccttagtggaactgcacatcaccaaaggcagagaagatttctaaaatagctagagaagaaagacatgacctaacaataatgagactgacagctggcttcacaatagaacagaaaccagtgtgacagctatctttaaagttaatattattttaggaagaaaaagcagagcagagaagcacaaaatgcaacactagaaatgaatccaaatacagtatctatcagtaattacaataaatttatatggactgaagtcactaattaaagaaaaaagattgttagaataaaggcatatttaaaacgtacagaatatttaaagttgaaaaaagaaaaaaaatatatattccaggcaattatcaactgaagaaaggtaagatagctatgattgtgtcataaaaaataaaatttaaagtaagcatattactagagttaaataattctaaacttacatgtatctaatatgaagttcaaatatagaaaagcaaaaattcacaaatccaagaccatgttgagacttttgaagactctgtaacagtaatttatgtactaagctaaaaataattttagtaagaagatttgaaggaaaacttgagtgatcggttagcatttaaagcaacttgacaatactacagaggtggttatttagtaggaagacttaaccaaaaagccccttttcggctgctatgagactttaaatatgtttatgtctgactattatggaagggtttgttaatggaaattaggaataattttcttctttagtgaaataagttcaaaatatgtgtgttggttagaaatatcctataggcatctccagtctgaaacaaagaggatttaagaatctacgggagtccagtaggctattggaggactttgtcctactctgtgctcagccatgttcaggtactctgtcacttgaactcattagaagattagctaaatactgctgctagaatggagtcgtatctgcttagattattttatgtaagattcttgtcagaatatctaaatgtgcagaaagctgggacttcattggtctttcatcatggcctatgtgactggttttttgcttgcttacaaattcatatttgtacctatggttaaattcagtctcagatcttgtatttctatcataccatgcataattatagttttattggagtggagatctaagtatgagctctaaatattttgtgcaaaaaagtaataattgtgaagaatctattacatataggtagtttacagcactatggtttcaattcattgactagaggtcagaatccaaaataacttgagccattactgtggaattttattttctgattttatctaataaaaaaagagacttttgtcaaaacaacagtaacttgaattattcctgtggatcataactggacaatttggactgatggaaaatgagaatatttattaaaaatgtcaaaataggacaagatcttagaggatactttcttttatataatcatgaggacctgtttgacaaaaatttgctcctctctgacctatcttatgggaagtactccaacaatggataagatgtacttattcttcatcaaagtaaccttttatttgcataaaatagcagtaaataggatagcagtaaaagttctgtaggtttctttttgaagtatgcactacttaaaattatttaaatatcaccttttacctatggaaaaggcaaatatgtatttccttttacatatggaaaaggtcctggcttagacgtgttctgattttatattcttgtaagtcaagatggagagttgggtagagaataagggaacctggtacaaagaatgatgtgtgaaagaagatttttagaactagaacagtgctagattgtatcaatattgtaagctatttatatacagaaactgtttgagacagctatttagtctccttcttttgaacttctgcaacttttcccccttagcattgtgtggttagctatcttgcccttatcttttcaactaaacagatgttacattcctcaaggataggaagacattgtctttggctttcttatgtgcccatccttgccagcccattactttgcagatagtaaatacctagtaaatatttgttaagtgactaattccctgaaactcaccatctttgtcatgtctcagtaagtcattctgtaaatacttcagcatatcacatattaatcattgacatttcagaagcaaagagagagttctgatgatcccaaaattaagtttcatttctttgtaggaagggctcagccttcttcaattttgtgtcccctaacaccttacaaagagcctttcttggaatgggcttttaatatgaagctgttgattgcaaatgtgggttctgttatcatgagaaactgtattgcatccttgcagatagttttatagtcctaatggtctacaggccttttttagccaccatatttttaaacaatccttttattcagatctagtgatattactctagtggcaatgaaaaaaaaaacatggtaagaaagtatagccctgtttctactggatgtagatttaattttcatttaaagtctttcttaccctgctctattttctctatttttgttttctcttggggtttcatctgttcatctgtgggtctgtatttatttatttggcaggtataatctttcctttcctctccctccccctggcatctccttggaagctgctcttactttgtgtcaccctaaagctgatggtgactctgttttctggcttcaaaagcagttttatgcacttttttctctctctctctcccactctctatcttttttgaaatgagctgtctttgattatagtttgacagtgtggtctgactgctaacattgattcccagcagtgaacaactttgtcatattgttcaacattaggtttcgatgtgtcatttaatagactaaaaagccattcccagtaaaatcgaattcctgtgggaatcattgttaaggacgctctcaaaatgaagtaaatatgtaatgctttagaaatttcactggaaaggcatcaggtgactacatttactgaaactaccaatgtcttagctggattttatattctggaaatgcaatttacaacttgcttgcctttatttaggcaaaatgtgattcacaataattaagctttatgagcttcttcacttaggcaggtcaaataatatttttattttgtttttaactgtaagaaaatacttgctctttcttcacatttctatatgtgaacctaactaaattcaggtctgggcccagaagtgcctgtcccatttcaggctagacatgcagtatcactaaaaactaatatttaactgtatgctatagtggtggaaagagcaggccctgaaaccagactgtatgggttcaaatgccacctttggcatttactgactttgtgacttttagtgttatgtaacttatctgtgccttagtattgtatctataaaatggggatagtgcctcctttataggattgttggataagagttaatacacttgtaaaatctgtgcacacttagtgtgcatgaatcatattaagatttcagtattatttgtcatgcttattatgctgttttgtttttttgtagttgacaatgtccaatatttatttagagatattcctctgtcttatatctgagaaggatgcagaagtagaaccaaaggctatcctcttcattgacccagcagtttgtttctcacaccaactttgcataacactcgctaacagaatgaaagcacttcagtagaccacaccaactttccttgggtggcagtgtggaggccccttgtgattacttaagtatgctcccgagagtctgatttccctttgccatcaattcctttttgagataagactagaaatgttttccacatgtctttaaattttcagcgaacatgtttttcttacctggataggccatattattactgaggttcaactgccaggatctcagtccctgcttcagaggagtataaacatgggtggacccaaagagaagccaagtgggtagcgcccactaagcatttgggcatctatattggttcattagccatagagatggcatttagataactattagttgaataacatcttactctttgtgtggaatcgttttataggcactggctatttcagatcaagtaaagtttacctctagagagaagcttggttgattccagagaagaagtctttatttgcctcagattcttaccctggcaatgaactatttttagggctgtttgtagtatgtgccttagacctaggccttgagtcagtcaaagtaaccctgtctatcacttctgtgtcttggctaaactactacatatagagccttcactcctgctgcaactcttgcccatgtcaagcacatctagagcttagtcctgctggtacctgacatgaattttgaacctgtttttgtctcctgttttgtcttactttgccgtgggctgtctttgcctgggcttgctctacgctcttcttctaaggtctgttttggcttttttttttttttttttccaaacgtatcccctagtgccatgccaggtaagtgataggtcctcagtaaatgtttatagaacagaaatgctggatccccctgcaatggaagcttgtctaatttgctgtgaccttgcattcagctttgacttctgtgatggtatccctacaactgtacttctcaatgctcagtaagctcttactaagtgccaggcactgtgtatatcactttgtattcagaatatcattttatcctctcatgaaaccctatgttattggtattttattattattattattattccctttgtacaggtgaggcaaccgagacccagagagattaagtaactcacccagagtcatccaggccaagtaaccatcgatgatgggattgaaatccatgtctatctgaatgcagagacagatcataacctctactgggttgccttgtatatcataccatttagaaaatagcatgacactttgagtcagctgtcccataggcagagtttatatttcatctggttgggccaaatctccaccttatcctaaccaggttttgtgggctgctttagctgcacttgctcagatggctataaacgtgaggcttagtgtccttaattgctgctcgggttggagagcgcattgatacaagaatgctcaaagactaagccactgtttgtgggatggaaactccaactgctgaactgaatcagatctgccagcatctttagaagaaacatgaaagtatagcagagctgtagctcttcccatatctccaaagcattcacccgtcctgtgtaggtagacatgaaagtttttatttgcaagtaccttctactctttcttgagggctttctctggctcctgaagccaactcagcttggagggagagagggagtagatcagaagtgttggggagttgaaacccaggagatgtccatcaatgattggcaagagtttgtagattaataccctagcttagtttctatcaaactgtagcatgcttaagaatcttgaaaagttgtttaaaaattagtaggttggaggtgaggcccagagtttgcatttcttttttttttttttttttgacttttattttagattcagggagtacacgtgtaagtctattacatgggtaaattgtgtgtcactggggtttgttgtacaaatgatcctgtcacccaggtagtgagcatagtaccctgcagttagtttttaaatcctcactccacttccaccctcccacttctagtaggccccagtgtctgttcttgtctttctatgtgtactcaatgtttagctcccactcatcagtgacaacatgcagtatttagttttctgttcctgtgttaatgcgtttaggatgatggcctttagctgcagcatgtcaactgcatgttgctgcagtggacatgatttcattgtttttttgtggctgtgtactcagaatttgtacttctaataagcttccaaatgatgctaaccttcaaaccacattttgagtagcaaggccctgttgcctcccatttgggataaatatgcagtatagggtatgctgtaggttccttagcaggattgagctccagttgttgataaatgtaaactgtttaataataaacactttattatctcctttggttttctttctgacttccctacttttctatcaatgctctctggcatcagcatttacacaaactgctcaactacaaacactctcatgcttgtctcagtgtcttcttctggtagagaccaacctgagcagatgaccataccaacttctagaatggaaagccctacccagacagtgggactgtctccagtcctccagcctcaggattttggccgacttgaggtcactctcatggatcccttccagaaaagtatcactgggcatgaggtagtccaggttgagagagtgtattgatcttaaagtgtttgctgatgacagcatagctggcattcttccctgggggaattgccaggacccttatttgagaaaaaggtactgtgttctttctctagtgaccatagggcttctaaacttgatatgagccaagattgcccagtattctgggatagattttttttcttaagggttaaaaaaagagagattcaaatcttcaactctaagaaatctatcacacttttgaggatccattagggataagggttagggagtagttagtcaccggcatgctttcactctgaattcctgctcccagctgaattcccttaatgttttctctctaccagctcctaaagttttctctggttctcattaaccccgaatttaaacatggctcctcctgcttcacttcccacagcattactcccataatgctgttgggtatgttagacccttcctgaaggtctgaggttaaaggatggaggttacctagagaacacttaaaattcagtctaagatactaaatactatcactgtgctactaagaattagtatcacagtcactaagttttggcatccatttctgttgccaagcttcccatactggtggctgctgctcatatgagccccaagacctgttatattttctcatcttgttttatttttcttctcagttcaagctgccccctaccagcacctccctgtgtgtctgcacaggctgtagactgtgcaactatggggggcactatttaccatagactgcgatgaaaatagcatcccctagagtttatgcagcttgatagctctctgttctcaaccccaaaagacttagacaccactctcttaaaaccagtggaagacggaattttctattattttattatacacagcaattaaacatcattttctttcaatctgtattttctagaagtgccccaagaatcccacatcagcataaccaaaagtgtcattaatgtattttttccccaaaacaaaatagcagttttctttctgtgaagaattctgtcttccttttaagctcaaattgcatccagcttctaaaattgcaatttctctgcccgcactttctgtttagcccagtgaaggatgacacaggttctatctaggccttaatcaaacaaatcactgtgaggacttctgtcttagctgtgaccctgggccctttgggaattcccgtcccccctaggcccttctggagccagctttttatcttgatatttctctgctttcaacgcaggcttagaaaacctttcaattaaagatgtcatgttggccttaatggaagccgctcttcatacctctcattcccccaaataggctgttttccattggcagtgattcataggagccacagaagagtttgagatttaagtcattctcaaccagttacagaccctaggagcagttacagacgttaggtgacagagttgaatttcagaatccatagcctacactcatgctagtaatggtgagaagtgtaaacatagggataagagacaaggcagtgatctcagaggaacctaaatatagttaccatccctgtaacctttgcataattgttttttcagccttcttctctgtaaaatggggatgataatccctacgttacaggcctgttaaaaagattaaacaaacgaatgtctgtaaagttcttagcatggggtctgacaataataagatatcacaaaaaaactattgtcatcaaacctctaagtctgtgcctctgagggatgtggtatcctgatataggttggtagtcttcctaagtaagttgaatctcaggcagcagaggaaaagtccagtgaaggagaacttgaagattctaaatggatgtgcatagcacaccccttttggcagaacagtgactcaagactgtaataagcagaaattaagggaacatcttcctctggagctcctaggagacttgaaaccagtggcagagtctcaggccctgtgggatgttacattaccacaaatctagccatagcctactattaccacttttggtaggagccagctatactattattattatgaggaaactaaagctattaaagggttgagctggtattggaacccaaataatccaactttagaacctgtgctctttaccactgtttttttttttgtctccttaaatatgtacgtgcgtgtgtacctattatgcacataaatataaaattatatatctattaatatatagtatatatgttaatatagaatatcatatataaagttgcaaattgccttaaatatatttccctgtaaaactgatatttataagtttagaacatatttttttcttgcatttgaacaatgttcatgtatactttggtctcacaaatgaaacctgtttgtcattgtgcttcctaaacttgaatattttatggaccctgttgaaagacattctctgggacccttagtattgacataaataattttttgttgtaatgttactctaaaatgtagaaatatataatcaggtataagtgtattatgcttgtggctcctaaaattatttaaaaacaaattttgaaactacaaaagcaatggcattcaaattaatgacacaagtttcatgtggcaatgatgtttgctggaacgaaattgctacttgagaaatcaatatggtgtagagttacacaaaacaggatctttagagttcagcatgacagaagtaccatgtaccatgtgatgaaaacttttgctgctttttttttcctgctttttttttcctgttgaaattgctatgaaaccattcacaggatgggcagaaacagcctttgctcttggtgtgaatgcaacatttatatactcagtgtctacctttgttcctccaaaataatggtacttggtacaaattgattataaatgtgacttttcagtatttgatcagaacgggggataataagggagtcatgcagatgacactaaccagcatttcttctgctatctgcattctgtccctaagggatgtcatctggtgtcctggctttaaaaaacattcatttgctgacaactctctaatttatatctatggcgtgtattgctcccctgaacttcagatttgtgtatctaactgcctaatagacatctcggcttagatttctaaatcttacagtttacaagtcccaaacaaatcttctggccccctgacctgctccaaacctgcttgtcctgtattcgtctccatttcccagaaaggcaactccactcttcctgtcgtacaagccccaaaccgtagtcgctctttacttttctctttttctcacatcttaaatccagtcaccctgaaaatcctgttggcctaaaaatatatccagaacctgaatacttctgcctgcctccattgctggcccccactcccaaggcaccatcatttcttgcctggatgatggcagtaacctcctcatttgtctccttgttttcaccctggcattcccaattatgtagtgcaaatacagtattttacatagcaatcagagtgatgctttaaaagtaaaacacctaataggttactacagcattcacagtcttcaaccctctaaagggcccatttcagagtaaaaaccaaaacccttaccatgtccgtcaaggccctgccactgttctttagtcagttgattccagccttacttttcttcaaacaacacacaagcctcgactttgtgtaggctttgcactgcttttccctctgctgggaatcctgtttcctcagatggtcacctggcttgcacctcctggcctctgcttagatgtcactttatcagtgaggccttccctgacaatcctatttaaaaaactctgttcccaacatacttcttcctcatcactttctcacctgctttatgtttttttttttttcccatggtgtgcctatcaccatgtattagtatacacatataaatgtatatgtatttcaattgtttattacctgtctctttctactagggaatatataagttccatgaatgcagaaacttagttttttcagtatctaaaatagtgcttgtcacttattatatgtgtaataaacatttgttgaaggaatcaatgaatgcttagtttttaaaacttgtcagcagaataaaaacacgaaaggaagtattattagggagaggttgcaaatctgagggtaaaaattttataccagcgtgtaacaccaaggaatgtactatgagtacaacttagattttgtaaaatgttagaaatctttttactgccaactttcatttttatcaatctaacatcttttgaattttacagttgaacataacttctaatttctcctaaatatttgcatgtatatttacagcttatttaaaaggtaaccacggccaattgtgtgaccaccaacaccatgctggggtgttaatatagttcagattgtctgagagaaaagttctttgtaaatcagtcactcccctgattttcacttggaattcatccaattattgacagcacttagtttgtaacatttcctggactcagaagagagggaagcttgctgagctgaaaccctgatatgcagtggagatttacattcagggggaaacagtgtctgttgaactgtgttaacagctatccatgtaggaaactcgaacagtatccaaagagcacacataattgtggtgattaagccgataagctggtgacacaaggaaagaaagtacaaattgaagtttcagcaacaggtgtaaggcacgtggtctatcctttcctggtagtcttaggaaagtaataagatagcttaattacatgattaaaatactcaaagtccagctgcaacccatagtttctgcctgtgcttgcttgcttgcttttttcttattagaagtgttgagatctttagattgttatggtttacctttctgttgtcctctatttttttttttttttaagactgagtctcgctctgttgccagactggagtgcagtggcgcgatctcagctcactgcaacctccgactccctgcttcaagtgattctcctgcctcagcctcctgagtagctgggattacaggcacacaccaccacgcccagctaatttttgtatttttagtagagatggggcttcaccatgttggccaggatggtctcaatctcctgaccttgtgatctgccctccttggtcccccaaagtgctgggattacaggcgtgagccaccgcacccatcctctgttggcctctatttttttagcttttatattaaaatactgttaatataaaattaatccaagcttgtcttcacattctgctgttttttccccccagtgtaaattaatgacttactcaaaacaatttttaagtcattagctaaaacgtgtacacatcttaataatatataacaaatagtgtgttcatgaatacacagtgtcttatatacacttattatcatgtatgcgatatatttgtttgtacttcaagaacattatgaaaataagggatgaaaccatgatttgatttgcatgcataagaaaaaagagtctctttgtttaaacagaaaattgagtcgtattgaagccatacttcagcattgtaggaagcatcctgttataagcacgtctttcttttccttcctccctttcttccttcatgtttcaatagatattgattgagtacccactatgtgccaggcaataaagtacacactcagtttggcattggtatgaatgctaatttagcaatcctaggctatcctggagtggcatcttgaaagtactcagttggagtgagcttgcatttagtttttcagttgggcatgggaaagatgaggcccatttccctggatttggaatctggtggttttgcatttgccagggcaaggtgctgtgtttattctctaaaagagtctcacttacctgttagtttggcttcaaaaacttttagcaacctgaactttaattttctgttatgtgaacacacagacaccacacacacacgctatctatctatatatctatctattatctatctatctatctatcatctatctatctatctatctatctatctatctatctatctatctctgcaaggtcttatggcttatttttcttcctaagttctagacttgttttattttatcttcttattcttcctctgagttccctgttttagttaaaagtttgcattatatattgtagcaaattgtttttgaggaaatgtactatatttattcaatacaaaaagataaatgcgtacatgtctagaggactgagaagatagatactttgaaaactgccctaagattgaatgtaataggaagatgaaatgttcttaaaagaaattaaatagattaactaacttatttcccacagaccattagccagacagaaaatgataggaaagtcaatgcttacctgatcacctatttcaatatctagagggaggccagaggtttcacatctcattaccagtctttcctaatattatttctttatatcctttactttttcattggttactcataggggagatggctacctgagagagctctctatttgaaaatgtgtttatttcaataagaacaaaattatctggacatttttgtgtaggatattagacaaaatatttttatgaaagaccttgaagtctgaactttgtgtaggttttccacagtacagaaagaaggtggagtttttggctgaagctgacctgcatttaagttgagattgagtgctgtattacttctgttttgaatccttcttcaagacttgtccatcatagtcaatcccaaagctcagagtttctgaaaaggattttaggctgttaaaaaatacattgtatggtaacacttaacagtttttaagaaaaatgatacatgtgagatatgatggattttagaaattataataacaccctctggttagtgttcctttactacttctgttataaatcaggagtttgcaattttgacagctaatctttttttctgtcagcgaaaacttgagtcagcctcttaactataagctaactgaaaatgaagactctgtctcttaagatattgatatatattttccttggaattatagttcgagcctctgaatttttgtgtcttttgggctgtcataccctgtgatgaacagaataggactttgttcctttacagctggattaaagatataacttcagatacttatttaaaaattagtattgtttccataataagcaaaatagtattgttaattcatagcacaggcattatttcaaaacaaactaatgatgaaactaagatttttaacataaatctgcagtatggtatgtgttctactgtccttattccagctgttgaggatttgaagtgagaacgggccaattttagcatgtgttggaaccatccatttgtctatttgacaaagatcttagaatcttccagttgaaaaggtctttggagaccatctacttcaactcccttaatttacagttgaagggatccgtggagaaagttactccccaactactatgttaataagtacaacattgttactcagttcattgccaggcaaacctttgttaggaatttaacagttccacaaatagccaacaaatagttggcaaactttatattcttatttgtaggcagctcatcatattcaggaaataattttccccaggagtgctctgactttaacacatggaacttgttttcactgagagaacaactgaaattctttcagaagagatgttttagaatctctgttataataaaacacagtataatgttacatgcactagaatgtagtgaggtccaactttcattttgattccattatttatttgaacgctcccttcctcctcttctcttgttttgtttctttgtctccatgtttccaaaaggagttcttatcttggacaacctatttcatctttaaaatagaagtaatattgtcacgtcttcctagatctggggggctaaacccagaaattctcgtgactttcttactactcaagacagtcttaggattttttttgttttgttttttgttttttgagatggagtttcgctcttgttgcccaggctggagtgcaatggcgggatctcggctcaccgcaaccttcgcctcctgggttcaagtgattctcctggcttagcctcctaagtagctgggattacaggcatgggccaccatgcccggctaattttgtatttttagtagagaaggggtttctccgtgttggttaggctggtcttgaactcctgacctcaggtgatccgcctgcctcagcctcccaaattgctgggattacaggcgtgatccactatgcccagctaggatctttatatatttttgaatatatttattaggtatcttctaaagttgtttaaagttgcttcaaatttaattatcagattgatttctggaaacattgtctttctacctcctcagactgctggggaattgacaggaaaatttggaatcaaacacctagttattagggaatatatttcatttacttgcctggattaaccattcccctcctcccgctctagctgctatgtgtatttagacctacctttattgtaaaatattttaaaaatgtacttctatttttaaattataaaataaggcatattctctttataaaatttggaaaaatagaacaatttaaataaaatcaaatgtttataatcaggatctaaagatgatcttgctatatactggtgtttatatatttctagtattgcttctattatttcttttcatttggaattacattgatcatttctttttttctcttttgttccattgaatcaatatatcatgggcattttgtcatgtcattaaatatttttatgaaagttgacatagtgttacaaaaatgtatcatgtggataaatcacaatttaaccaatcactattgttagtcatttgtgttgtttccaaaatttgctattagaaataatgttataatgcacattcttgtgtgtatatctacgataattttcttagggtaaatacccaaatgtggaattagtcatatggtattttcatatgtaataccaaaaggtcctctagaaatttttatttcttaccatagggcccatttacctctgtcctaattatatatatatatatatgtttagagtttagagattcctcaaaaagttaaacatagaactaccataagacctagcaataccactcatatgagtagttttatgttcattatggtagttctatgtttaacttttttgaggaatctctaaactgtttttcatagcacctgtaccattttacattcccaccagcatagcacaagtgttccaatagctccacttgttccaatagtaacacttgttgtttcttattttattgatagtagacaccctaatcattataaagtgatatctaattgaaatttttatttgcatttcactgatagatagtgatgttgagcatctttgcaggtacttactggccattcgtgtatcttctctggaaaaatgtctattcaaatcctttccccatttttgaattgagctgtttgtttttcattgccattattgagttttaggagttcattatgtgtttcagatattaatcctgtgtaagatagatgatttgcaaatattttctcttattctggggtttttctttttaatctcttgaaaatgttctttttttgagaccaggtctctcattctgtcacctaggctggagttcagtggtgtgatcacagctcactgaagcctcaactcctaggctcaagcaatcctcccacctcagcctcccaactagctaggaatacaggtgtatgccaccatgcctggctaatttttaattttttgtgtagaggtgaggtttctatatgttgcccaggctggtctcgagctcctgggctcaagcaatcctcctgccttggcctcccaaagtgttgggattacaggcatgagctactatgcccagccttgaaagtgttctttgatacacaaaagttttacattctgatgaagtcaagtttatctaaatttatcaaaacacgcttggtaatggtgtataatcctttaaatatgttgctgaatttatattgctagtattttgtctaggatttttgcatcaatattcacaagaaatattgatttgtagttttcttttcttgtagcgtctttggttttgttatcagggcaatactggtcccataaaacgaggcagaaagtgttccttactcttcaattcctgagaagagtttgagaaggaatgaagttaattcttccttaaatgtttagtagaaatcaccagcagaaacctttggtcctatgcttttttgttgttgttgttggaagccttttgattattaattcagtctccttagtagttatgagtctatccagattttctgtcttcatttttcaattttagcagatagtgagttgctaggaatttgtttatttcatctagattactcagtttgttggcatacaaatgttcatagtattctattcatagtctttttcttttgttttgtaaaaccaacagcacttgcttttggtgcatccaataagtttttgtttgttgtgattttattttcatttgtcttaaagcattttctaatttattttgtcatttattatttgatctactggttaagactgcatagtttaatttccatatacttatgaattttcctattttccttctgttagtgattcctagtttcattccattgtgattggaattttttttgtatgatttcaatcttttaaaatttattgcaatttgttttgtggcttaacattattgtctgttctgtagaatgttctatgtatgcttgaaaaatgagtaatttattgttggatagagtattctgtatatgtgtgttaggtctaatttgtttacagttttgttcaaatttagtattttcttattgatgttctgtctgttgtacctgttattgaaggcaaggtattgagtcttcgactattatctcccttgtattccagtatgtagaactatttcttccttcaattctaggaatgtttgtttcacatattttggggttttgttgtttggcacataatttataattgttatatatttttgatgaattgacccttttatcagtatataatgtgtgtctttctccttttacagtttttgacttaaattctattttgtctaataatagtatagcaaccccaactatcttttggttacatttgcatgtaatgtcattttccacctatcagcctgtttccatctttcaatgtatttgtgtctttagatctaaatgaagcctcttttggatgacatatagttggatcatgtttcattttaatacttttgctaatttctgtgctttggagattttaatacatttacacttaaagtcactactgttaaggaaagatttacttctgccatttgttatttgttttcttatagcttttttgttgctaatttgctctattactgtcttatttttgttcaattgatttttttttgtagtgaaaagctttgattcctttattatttctttcgtttatattctacaggtattttttttgtggttactctcagggctatataacattctaaatttatggcaatgtaatttgcatggatactagttaaactttggtcacatacaaaactgcctctatataccttcatgttattggtatctttatacgctgtctacccaatgacataggtttataattgttatttatgcatttgtcttttaaataatgtggaaaataaaaaatagagtcacaaaccaaaattgcaatattacctgctttgtatctgcctatgtatttacctttacctgagacctttatctatttatatggcttgaagttactgtcaagcatcctttcatttgaacctgaaagactcgggttagcatttcttttagggctggtctagtggtaaaaaacagccttagcttttatcagccccgcccacacttttactgcctgagttctaaattagatgaaacaaagatgagtaccttgcttcagtccttcttgtatccctcaggcaggttagagcaaatgtacaaataatttgcaaataaagtctgttctgctgtgtttgctttgagggagggaatgggaactggaatgctctggtttcccgaccaagaccactgtcagaccagggagagggaggggcaagtatgaataaagacaccacaaaattttctattatttcgaagataggtttttttttgtttttgtttttgttttaattaggcaattgcttgtttgctgtaaacttttgagtttttttcacagctccataaaagtaggtttagacacttgctgcttgtgttttttgatgtttctgggggatgggggcaggcggtgggggtgtttaagaacttgatgcggcctggagcggtggctcacgcctgtaatcccagcactttgggaggccgaggggggcggatcacgaggtcaggagatcgagaccaccctgtctaacacggtgaaaccccggctttactaaaaatacaaaaaaattaaccgcgcatggtggcgggcccctgtagtcccagctactcgggaggctgaggcaggagaatggcttgaacccaggaggcggagcttgcgttgagctgagatcgcctcactgcactccagcctggacgacagagcgagactctgtctcaaaaaaaaaaaaaaaaaaagttgctttctagtccaccattttgctgacatcttaaattttttttttttttttttttttttgagacggagtttcgctcttttcgcccaggctggagtgcaatggcgggatctcggctcaccgcaaccttcgcctcctgggttcaagagattctcctggcccagcctcccgagtagctggcattacaggcatgtgccaccacacccggctaattttgtatttttagtagagacggggtttctccgtgttggtcaggctagtcttgaactctcgacctcaggtgatccgcccgcctcagcctcccagactgctgggattacaggcatgagccaccacgcccggccttaaagtattttttaatgtgtctaaatttttatattgtccctttaaggtatacttatgccctgcaaagtaattatacacaaaccaataagctaagaaagaatgaaaggagtaataatttttggtgctactttaactgtgaatttagagtaggaagctttttttgcaagtatattttttgtataaaattaagaaaatatataaaataattgtatcccccttttttaaatatttttacctcttactcttttcaggttctaaaatgtgacttaattatgaaggttattagcaagaagtggcatttccaaaagtttcagcactgataccactacaattacaactacaataccactgataccactgataatttgcttcttctttctctcctctgtccacatttttagagttgaagtatatttttagagttgaattttaatatttatttttggggaagtaattttgaagagtcagacatgaagggtgattgtcaaatttcttctttgtttacaatttaggttgattgttaatgacaatttgtgtactggactgctgtgatgcaatggagtctgagactgggttatggctcagctagaaagggtattgtgaccaatttatgatgtttgccatagtcctggaaggtggcagtatttatgtcaatcattttccatctttattttcagcatccctggagccccaatctaataaagtcctcaaatcacctatgtgctgctttaaattaccagctgttataaggtacttaatttgaatcatgtaaatctataataaattggggatgatttctctagtagatcattttagaggaactataatatttaatgaaagtccaagtaaagagcgtatttaaaatgtcaaaagaccataggtttatcacattgaattctttattcctttgcagtctagacatttaattcaccttgtttctgttcgggttccaaccatctttgaacacgcaaaacaatatgattcacacaactctttgacatactcagcctaaatttatacctaatgtttacctacgtaacagcagtatttcaacgccctctttttcatttactctttggtcaaagaaaatctctttcacccagtgttagcttaagtttttgatattgagcttcatgtctctgagtgtcatatctttaagtacatttcctgagttttcatttttaggcattatctactggcattccattatgaaaagataatttgtctcttctttctctcctctctccgcattaccccataatataccagactttctccaccctccagctttcttacataattatatcaaagtaatgctatacaaattatgatatagctctgttcagtgtttgcattactatacgtatgaaaagcgatcaagaactagacatataacagctacaatattttttccttttctgtgcagctcttatttaccttggagttaataatagcatttatagttatttgcttggttttctatgtacttgttaattcaaaccaaacatttaatctgttacctaaatctcttctcaggatacccagacaaatctggtattccatcatttttgtctttctgaagaggattttcctggaaatttctgacctcctgtcctgtgaacaaattatcctgtaggttttgtatcaactgtcatcatcctggcctgtcccctcaccgttaccctggggactcttcgcatctttcctctgtcctatctattgtttcctgtgtctcatcttcctgtcttagtttattcttttattttggtgacactcatccctctgtatctttcaaataaatgctactttgcaactaaatttttgaatgatcttgtatctgaaaatataccttttactttgttgatggtttcctgactaccgaattctagattgaaagtttttttcctcagtgttttgaaagaattgtttttgttttttctcctctggaagcttgtagtacactaggtaccgaaatttctctataatgtgctttgatgtgggtttatttctatccgttgtaataagctttctgtgagcactttcactcatgttctccctggggaattgtctaaattatatcattgattttaccactcctcttgtttatctttgtggaatttatacaatttgatgttggatctactggactggcctttctttcttacatttgatctctttgtatttgatattttctcgattctgtcaactttttattttttgttatattttttgtttccaagacttattttttttgttccccaaatattcctctttttttccttttagtaaaagtattttgtttttatgttatggttctcttctcttatctctctgatattaataatagatttttttaaagttttcttatttctgcatattgcatttccttcaagttgctattatacatattagtttgcttaatttttaatctttcatattagtgactttcctcagatgtcttgtagtcttttgcttatccactgacatgtaaaggtgtgggacaaagtagctcgattggagtttttgtgcataagtttgtccatatagttttgcagtatgatgatccatttgggctatttagttaggtaaacttcagagttatcatctccatatttttctacttaggcagatcagatatcccagagaaggatcctctagcctccttcctgtggagggagtacctagcatcttcagagcccccattagggaggaaaaatggggagattctggcatccattgtgcttacgttcacttaatctctctgttttcagtgtgttttccactgttaactatgcagagaccttttactttaccccttagcccttatttgaaaatgaagagggacatttaactgtataagatccagggatgcaatttggatatccacctgcttcttagatattttttcagcaaatcgttgttatttggctttattccttcacccttatctttgaagtacccataaccaccaattccttagtcttttagaatttagcagtataaatttggttggctcttacatcatggactcaattattcacccctcattcctctccaattaattaccttcttttatctttttttttaaacggtgaaacttttataataaattgattttattcgtcctctgtctttctttacttgtcatgcctcccagtctggtttcagcacccctcaactttcatttaagacacctctgtgttgataaatctagcagatatttttggcctttgaattatttgacatctgtgaagatttgccccagttaggtactttcgccttctagtttgtctacagcttctctggaagctctcagttttttctagttccatggtcttctactttcctcatgattctttcttttagagaatatcactcaagaccagtaatatcaatatatctaatatataatattagatcaatatatctagtatcaaatatatatgtatgatatataatatacatgtaacataatatataacatatctcactatattatatatgtgcatgtatctgtatacatacacaaacatgcatatgcaaatccacaaccatgacacatgccaaattgtcctgtcatgtagtttggtcacagacttttggaaaacttgctgtataatgaatgatttctcttttttaatgtgcaaaggtctggaaaacatccttagaaatatagctggtgtttcttttatttgctccatgtcaaatggcagagctggaagtgctcagttaaaccctgattccttgcagcttaattcttcagtctcagttttagagtaatgaaataccaagtggctgaattagcagattttggaatgctgtataatgttctctttataatggaaatgattgatggtattgtgtaaatgttctatgatatttggtaaaagttaataattctgttttcttatttgtaaccttatcataatttctaccatagtaatgagcagacttttagactggcaatttattgaaaatgttagtaaaataatgatatcatatgaggcagtttagtctataatctcaaatgtaatttagcagaaaatattaaatagccattttgtaaactgacagaactcaatttttaatgaattgaaatacagatggagagaaatgccaaaatggattaatagtgttataatagctgatccttttagaccagaccacactgtcttcaagatatatgcctattaaaatcttggtattctaattttaaatatgacagtagtgctattaacataaaaatatgactcgattaataagattcactttatgactatttaactctctcatagtcaggaagaatccctcagtctagtattcaagagaatcttcttaatttctagattttcgaatagaagtaggagattaaatcaaaatgccagttgttttatgaaatgaaaagaatgtctgttgttgccttttcagattaggcatattggtacttggtgttatcttcctgatattaattttatactactcctgtatttttactaagatgaatttggtttaaatgtgaaaataaattatttaaaaagagataaatcttttgcaatcaatgtcggcaatagagttgatttgcagcagtgttatctttgaaattaagtgatagtgccagtaagggttgcttagaatacttcttacagatacttatatgaattaatggaattgtacacttattacccgtgaagataaatatgatcattgaaatggtatgtgaaacattcaattcctaaattaactagaatgaataagaactttcattgagtgattttttattgtatagccgaatatactcctgagtctatagggagctttgcctttgagttgactcataaatattatgcttttcgatgaggtaatttggtcctccagtaactaaacccctgaaggggaagtctaatattgtcctgttcttgaacttccctctaaatttaggactgatacagtgaggggttaccttttaatatgcagtatttactgctttaaaaactaaattaactactcctcttggtctattgttaatgaattgagggttcagcttaaccttcacaaactgtttaaatgaagcacctgatgatatttaaactcactgtaatatttcatttaaaataaatcccagaggtacaggttctaaggttgtaagaaagccacggtgttcctatatatatgtatttatttcttttacactaggccagacctttataatttataaccaggatgatttctgtggcctttaaatgtccacagtgcttgataatttcttccttgttcatggtcctgttaggtaaaagttttacacttacaaaattagatacaaagcttattctcaagaagcatacagcctgataaccatattcagtatctccacaaggataaagaagtgatctaatggaaagagatcaagtaatgatcaaatacttcatatttagaagatcagagaaagcttcaaggagaaattgccttaaacatgtgttggaagttagtatagatgggctttggtccttttagtggactttacagtgctctgctcacctgagtccatttatagctgtggatggttcttggcatgcagatgttttcctaagtcaggcatcagcacctttttgcttttctgcctttgggctttctctggcactagaagagcttgcttggctatgctgcagtttccacaggggaatggagaggagttaacaccctcaagagcaaccctcagacagtggctgatgggaaagaatctatagatcaatggccctgcctccccagcctccttcaggagaaccatttggtggtgtgaccttcatgtttaccagagggtccctaacaggattgtgctcctgtggctcacagtagtaacttcatcattaatgcagccattattgcattttctttcttttctcgctttccattttcttatatttcttgagatcacttctgaattaaaccatctacttccaaatccttttctcagcatctacttttggtgtacccaaactaaaacggtttgttagcgttggagaaagaacagcatgaatcaagttgtgcagattaagtatagcatcagtgagtggttcagtttaactagactatcaggtttatggttccagggcaataaaattagtcaggtcacaaggaacttaaaagtcagtctaaggatttggggcttttcttcaggcattgcagactttccaaagacttagcagaaggaggtgacatgatcaggattttgcttccacatagtgacttgatggcagtctttaaaagagatcgaagatgagggagactgaaagtgtggagaacatctaggagacggttctgtcgtgctaggatctaggttaggcagtaacactagtgggaatggaaaggaaggatagtaaatgctacatttagcaatcggtttgatatggatgccacaggagagaaaggcattaaaaataatgcaatatttctagctttgactgctaactgggaggatggcaatgctttgttcaaaacagaaaacacagaggacgaacatatttaagtgagataaaacttttagtttacttctgtggcaaaatctgttagttgtctgtacaacagtctttctccctttctttttcagtatgagaatcctcattttggtcaggcctatagtgtgtccagataagagatatttcccagcttcccttgcagcaggttgtaaccatgtgactaagttctgggtaatgtgatatacaacagtgttgtgttagacttcaaggaaggctgcatgagaggaggagacccatctagaggtaagcgccttcaccttgccctcattcttactgcctagcatcccaaaacacggaagtccagccagagtctcagacttttggagcttggaagccgcatgatgggaatttttaaagactagggagaccacaccagccccaaactgcctacctccagaatttatttgtttaagagagaaataaacatcatcttctctgaggcactggtattttgggtttccttttttacataagctgttgtacctaatgctgtctgatgacacagagtatattgagcctgaattaagagcagaatatctagatggagatgttcgataggcagttagaaataaaaataaatacataaatttaataatagcaattaacatttgagtgataattatatttccaggtccttattgtgtatgcaaggaggcatacagaggcttaacagtttgcacaagatatataactgataagtggcagaggtgggatggaaaccctatactctctgatgtcacactgttaactattgtgctgtagggtgggatggagcttagaagaaaggtcacaagaatttatttttaagagaagataagttgagataattctttaaaactactaaaaacacagaagtatttatttgcatacatatttcacaaaattgttttatgacttttaaatcatttacataatatccatgagatccacagtttttacaagtaaaattatgtcaagaaagaaattcagctgtcaatctgaattatagtaattggtgaattagggaagtttattaatatttctcttgtctttttagagatgtttattaagagttctaccaggtccaaacaaatggaaaggcatcgaataactataaagttagaaaagaatttagacattatctggtgcagtgctctgcctttaagatgaggaagtgagacctgaagcagttgagtgactgaaagtggtttatcagagttagggacagaaccaagaaaataattcggccttcttattcatccttaagtttcccatatgccaggcttgaagaaagctctgttgcaattacctctaagttctcactgatcctgatccccaggatgtgaaatggttaagtattatatttagagtacttccacagcagagggggtaagtcaggcacaaatccagccatgctgactatctgttgtaagagaaaattatttgtctcaattcctctttttaaaaaattcagattatgttttaatgtgattatttggctgaagaatatcatggcataaaattcaaattcctccttagagcgtacagggccttctatgatgtgctcgcctgctgttatcacggcacttccccttgctctagccatgctgttcctggacattgttgatcatgttcctaccttagggctgtctcacttacagtcctctcttctaaatactctactattattatctgcagagctgaattcctcacttcctttatgggtagctcatacgtcatttcacaggatatattactacctggtctgtttaaatggaattgtttatttttatatgtattcattagtctgtctgactttgctagtgtcatgaagataggcactttttttttttttgctgtatattcaatgcctaaagtagtatctgtctaacatgtggtatgtattcaataaaaaatgtgttgaataaatgaagatagtacgtgagggctaacttataaaagtagtattctataatacagattgttattttagagcccacttaatagttgttactttctgttttcttaaaaaccattatggaagtactgtaatcaagaggtttaaatatattgaaggccagttactaaaaatagtttatctggagcacttcaggtatgaggccttttcagagtctgtcatctgtagtcaatgtgagctcctttgttcttcaggtattccaaatttctggaatatttctgcagtttctaactaggactaggtgcctggccaccattatcttatggtagtaaatgaccctctagtggcctgagtgagttgatgtattttacttattgttaatttggtgcaactttgaagaattgctttcagaatctaagtctttttcaatatagagagactgaaaattttatgcatacaaatttgtagtcatagaaaataataataataataatggcaaccagtgtttatagaactgtcattatgtgtctgcactgggccaagctctttacacgtgttgaggttttaagtgtgtgtcaccatcagcaggtaggggaaattttctatttagagaaaaatagaccagttcatattcttaaacagaagagacagtgcacagctctacctgccttggaggaaattgtcattttatggtcttaaggaaggagatgaaataagcataataaatagtagtaaaagcagaaacacagtgaaagagacgtaaaacacattcataacaaagccccaggtgactgaaacataacctgtggataaccagcaatgaatgtgtaataggaatgtttcagatgattttttaagacattttattaagtgaagaaatgcaagcctttttattttgcttgacaactatttaattttctagtatgaccaataatacagaaaataaagtgaaaagggtaaaatttctaaaacaaagtggacaaataaatgattttggaaagaaacccaagtacttcaagatagagagaactgcagaataatcagaatcataaaattcaatcttcatcagatggaagtttggtcattcttatttaaacagtgcaaccatcttcatttgctaagtttcctgaagagttaagactactcacaaaacagaaaattccagtagctaacatatggcagcaatgcaatgaaatggaaagaaaaatggccagtttacctgaatattgtctcaccaagacagtttttttaatattctgcaagtggctggagaattgatttgcttgtatatggtttgacagagaaacattttttttttcaatctgggaaagcaattcccagaggatttaaaatagttagagaaattcatcatgtgatttttctcttctcaatgaagctttatctatgaaaatgacttgcatacatagttagtgttgcaataatatggcacaaaataaacaattcttttaaccatggtcatatatcattgaagacacatgcatctagaagttatatgcaatttatggattttctaaatatttaaagtgtcatgaatggctggtcttagttttagtcagtatgtttttattgccagtaagttacagatacagcagacaagtgaacacaaaactgattttgtgattgacttagctgaaagatatgaaacttctaatttaaattctcaaattctataatgcgattctgtatctatttgacgttacttgtaaagcaaagagaaaaaattgctacagcgtaccttgtggaataaatgcaatgagttatcaaatcaaatgaggcaaactgaaattattttgaatcttttttgtatttgagttttcatagttatggctttctaccatttttaaactcggtttagatatcatttcttcagaaaagcttctctgatccctaccaccactaccaccatcccctttcccagtattaggtgcttcagttctacactctcataacacttctacctttcctttttggcacctgatgcccttgcaattgttagtttaaattctctcatccagcctttattacagacaccccaagggcaaggatgatgtcagtcttgttaacaacctaaggtgagtcaagcacattgctccatcagttcttccttctcctgaatcataagctttcccttctctgttggctcatcccatcaatatacaaacatgctattgtttttccttttttcaaaataactctcttgactctatgtcccccatttctaactttcttacaacttttcatcaaaactccttgaaatggttgccaatactagttatctttaattttttcctctttcatccactttagtaacccatcactctactgaaaatgcttttattaaggtcaccaatgagtgccagtggtcaattctcatctatatacattgaagattgttagcagaggttcctaatactttctcagtgaatcagctacagcttggcaactacccacgtcagttttcttccacagaaggtctgttgataactgtattactttcctagggcttccataacaaagtacctcagtttctgcttaatactgcagaacttgattctctcaagttctggtggccagaagtctgaactgaaggtattcagggccacactcactccaaaggcttcaagaaataaagaatccttccctgcttccaatttgtggtggctttcggaattccttggcttgtggatacacaactccaacctctgcctccatcttcatatggacttcttctctgtctgcgtgtgtcactcttctctatgtctcctaataggacaattgtcattagatttagaacccacccacataatccaggatgatgtcatctcaggatcttaactacatctgcaaagaccctttttccaattaaactgccattcaagtttccaggcattaggatatggacatatcttttgtgggggcaccattcagctcactgtgataacgatcccagtgttcactgcttttgttcatagtggaggtatgatataatattctcgaccagatgccaattttaccactaattaattttttaattcaacagatagttattgagtaccccttatgcgtcattataggtcctgaagagaaagtgtaagcaaatccctactctcatggagttacattctagttgagggaaaaatagaattattcttatattacttaaagtacattagtacatttcctaaagttatagaagtcattttttttttttgacataggatcttgctctgtcacccaggctggagtgcagtggtatgatcttgtttcactgcaacctctgccttccagcttcaagtgattctcctgcctcagcctcccaagtagctgggtctactggtgcccgccaccacacctggctaatttttgtatttttggtagaaacggggtttccccatgttggtgaggctggtcttgaactcctggtctcaacggatccacctacctcagcctcccaaagtgttgggattacaggcatgagccaccatgcctggatgagaagtcattttaaacttataattaagtttctaaaagtcacaattttataaaagccagaacatacacaatacaaagcaatcttttccattcagtggttggcagactgcatatcagatgtttcacccacgtgctaaagcaaaagaaaaaaaaaagtgccaaaagtcttattaaatttatgtttatctgttgacaagtgatacaatgtcatgcatttagtgtgattttaaaccccagagtaaatgagaaagtgataccatgatgaccctgatttcgctcattaatgttgtatttataccacattattagtctaattaaaataaatataaacaatgtaccttccatatcatgaagccgatttcaaactaacttctgtttcatttaacacctctcctgcttcccaccttttccgaaatacttaattatgctgttttctttgctggctgtaaattatgtagattttgttactcttactaacactatatgcctaggcacttcacccaccttaaccatcaccctgtattgtgatagcgtcttccatatgcgtactccctagtgaacaatgagctctctaataggagaggccgtatcatttcagtttttgttttcccagcactctacacgtatgtgacatgtagtgggttaaaaatgaattaaacttagtcaactgtaggcttgacaagtacaaggagcaggattccttggatgctgagtgacctagctgtatcaaccaactgtctagtattgggttcttctttgccaatttaactcagtgtccttgtctttgaaaaacagagaataataacaatgaaaggacttatggattatttgtgagacacagtgatgtgtattaagcatgcacttactgtgtacctaactcttagtaagcactctgtagatcttagtcattaactttgcttggtttttgtttttagcattattgctttaaacatctatcctgacaatgaagtggattttcacttatacaaatagcttttaattgaaacacacagaggtttcaatttggcaggacccaaggtttaaaattgtaggcagcttaataaatagaaagtataattaatggctcaaattttgaaagccattaactatattttagtgacatgacttggaagagttagctgcataaagcacacatttttataaaaagaaaggtaagtggtgatgttttctaagctttctactgtttctcccaagcacctttttttgagtggatgtcatccttaacttttcccattcttttatattttatatttgacaattcactatgttttaaaaagggtttcttgggccggatgcagtggctcacacctgtaatcccagcactttgagaagctgaggcaggtgagtcacaaggtcaggagtctgagaccagcctggccaacatggtgaaaccccatctctactaaaaatacaaaaaattagcagggcgtggtggtgagtgcctgtaatcctagatacttgggaggctaaggcaggagaatcacttgaaccagggaagaagaggttgcagtgagtcaagatcatgccattgtactccagcctgggtgacaaaagcaaaactccatctcaaaaaaaaatttttttctcattaaatatttgttatatgaatctcttctctcttcgtcaatttgttaattctgtcttcactttatcactttgaaaattgaagtcatagaatttaagcaatgaataataatggtacttatataaatgaattttgcttttatattactacactcaaaatacattttcagtaaaaattgtttgaagtgttgcctattaagatgtttttaaataaattctcttgtgtatatttaagatacaaaacattataagacacatctatatagtaaaattattactatagtggaacaaattaacatattcattatctcacatagttacccattccccctacagtgacaagaacagctatatctactcatttagcaaaaatcctgaaaaaaatatactgctattaactataatcctcatgttgcacattagatttttggacttttgttcatcctacatatttgctattttacatactttgacttgcatcttcctatttcctcctcccacctcaaccctttattccttttttaatagattccacatataagtaagatcatgcaatatttttctttctgtgtctggcttatttaatttagcataatgtcttccaggtctatccatgctgtagcaaatgataggatctcctcccttctttaaggcagaataatattcaattgtgtatgtataccacagtttatttcatccatttgtctgtggacacacaggttgctcctatatcttggccatcgtgaatagtgctgctgtgaacatggaagtgccaatgtttctctgtcataatgacttcctgtgctattaatatatacccagcaggattgctggatcttatggcagttttgtctttaattttttgaataacctccagaccattttccataatggctgtagcaatttacattcccaccaacagtttacaaaggttctcttttctccacgcccttaccaacacttgttagctcttgttttttgataacagtcatcctaacagatgtgaggtgttatctcacagtggttttcatttgcatttccccgatgattaaagattagggcaccttttcatgtaccagttagccatttttatgtcatctttggagaaatgcatattcaagttcttcgcccattttaaaattggattatatgttttcttgctattcagtgtcatgagttctttataagtcatggatattaacccgttatctgttgcagggtttacagttttaaaaaataatttgtaggttgtctttttattttattgtttcctttgctgtgcagaagcttttaagtttgatgtagtcccatttatttatttttgattttgtaggctgaattttggcataatacacaagaaataattgtcagggctaatgccaaggaggtttttccgtatttctcctaagacttttgcggtttcaggtcttaagtgtaggtcttttatttgttttgatttgatttttgtacatgatgtaagataagagtcaattttattatttcgcatgtggaaatcaagtttttgtagcactatttgttgaggagactattttttcctctttgcgtccagttggtgatcttgtcaaaaatttgttgactgtgtaagttcgggtttacttttgagctctctactctgttctctgtgtctctttttttatgctagtaccatactgttttgattactgtagctttgtaatataattttaaatcgggcagtgtgatgcctctaaccgtatttttctcagaattgctttggctattcatagtattttgtggttccccatttaaaaaatatcctattaagttttcattttctaaaaaccacactgagttattgaaaaatggagtttttagtccactagtattattttaaaatatctaattttagggattttgtgtgtgtgtgtatgtatataagaaattgttgagagacagcattgagttggggtatggatcataggctccagaaccagtcttccagaacttgaatatgggttctgctacttatagctgtacaactttgggcagaatggttaatctctctatgcctcagtttttttcatttttaaaatgaatttaataatgttatttactaacagttgtgaggattgaatgagttaaatcacttaaaacacttagaataatgctagacacatagaaagaactgaataagtattagttctgcaaattaattaatggagtgaaaaggttttttgttttgttttgttttatttttggttgtgagtacacatagataagtcccagaggcaggaagtcatgggatttttacagagttaagcagtaaaagaaagcccatgaaaatgagacttgggccaggtcttagaggttctgccctcaacattccaaacaagaggccacagtaatcccacatcccgtaggtcatctctgagatcactggcagacttcccacactcagagatttgaaccttattctataggcaaagggaaaatattgaagatagtacagaggctagtacatgggctttagcagcaaactccctggaattggcttctgattcttttctgtacctgagtttcattattgataatagtaatgattcctactttatagggtcttgcaatgattaaatgaggcaatatagctaatatattcagaacaaacttgtctaaccccagctggtcacaatggctttgaatgtttgaatgcagcccaacacaacttcataaactttcttaaaacattatgaggtttttttgcaattttttttttggttttagctcatcaactattgttagtgttactgtattttatgcgtggcccaagacaattcttctgcttccagtgtagcccagggaagccaaaagtttggacatccctgaagaacattgcctggctaatagtaattgtttaatagaaattggctattaaaaattgtgagcaaaggaatattgtgagcagatctgtgtacctttacataattctaggtaaagtgcctgatcttctatatgagaacagagagaaaatgagacgtctgtagaagagtcaagattaatgagtatttcacgcttgtgctacttttccacaaggttggcctggggacatgggtgtggaaaagggaaaaccattgctgaatttatggcagttattgctaagcctcagggggcattaataccatgggatctccaggcctcccttaggtagctagggagcccggggcatgagtagaggaccacattcagagttcatggagaagattgcctctattccatagagtacctttgtgaacattagaagagggtgccactttctttggggccatataaccctgcagcagggcacatggcatggtaaacagagcctaggactcaccccctttgctagatacctttggacaggacacaacctgagcaacacacttatgtcctggccagagagcacttgtgattacgggaaattctgcctagtaagaaaacatgtgcattatttatgtctgtacatcttttgaatttggggtgatcttatgattttctttgataaatagaatgtgatagaagtaattttatgtgacttctaatgctagaccttaagagaccttgcacctttcacttttaccctcttaaaattctgctctgggatcgctatgtaaagaagtctagtccagcctcctggaggatgagaggccatgcagaggagaactgaagtgctctaggtgacagccagcacttcctggcagctgcgtcttcataagtaatcccaggcaagatggcaagaacaactgcctagtcatagagttgctgaaccacaagatcttgtgcaataataaatgagttttaagcctctacattttgtggtagtttgttatacagcagtggataactgatatacatatgtaggccaaaagggaaggaacagaggtaattctcggtctagaagtcatctgtagtgaccgttttctctcagcttccaataaagatgcttccagtgatatggcattgagtcagaacatttccttttcatgaacagagatattactgcatcatacaagtcagtttggtctgtaggagcatcagaaatgactacagagatttccagcatagtttctgatacccaaatggcctggaaatgtctgctggcatattacctttctagttactatgtgcctcataaagacagcaacaaaagactcagcaatattaaaaatgaagaaccaagttgctggtttattctagttatcattatcactgagagtgtgctgttacaatgttgatagtgatgtacgcgtttacgaagaaatgacttctaaaaacactagctagactagaaagtcacataatgaagcagtagaaagtgtagcaggaatctgaagaattgagataaattaaaaataaatgggaggctgggtgcagtggctcatgcttgtaattccagcactttgggaggctggagcaggtggatcacctgaggtcaggagtttgagaccagcctggccaacatggcgaaaccccatctctacaaaaaatataaaaattagccaggtgtggtggtgctcacctgtaatcccagctactcagaaggctgagacaggggaatcacttgaacccaggaggtggaggttgcagtaagctgagatcccaccactgcactctagcctgggtgatagagtgagactccatgtcaaaacaaacaaacaaacaaaaaacccaaaatgaaatacctggaaaaattggaaatatatatacattatatttaccaaatggggaaaattaaataagcaggtgaatctttgtattttggtcaattttactctcatgattctgattttatgaaattattattttctttgattttgcagtgatttttcattagctggaagctacagagcaaattattttgatgccaaagtgaaaaatatggagatatttattggaataatacaaacttctttctctttctcttcttctctttctttcttttaaactaaagtctttcatgaaatgggaattaataatgaatgccagctgccttcacactggattcttgctggaactttcactccccaattcctaatgctcttcttctggtagagcagagagccatgcccaagcagtcaacagactataacctggccttgcttggtcctagaagctgaatacctacctccccacaagagatggcataagagtaagaaatgagaactacagggccgggcacggtggctcacgcctgtaatcccagccctttaggaagccgaggcgggcagatcatgaggtcaggagatcgagaccatcctggctaacactgtgaaaccccgtctctactaaaaatacaaaaataatttagcccggtgtggtggcgggcgcctgtagtcctagctactcgggaggctgagacgggagaatggcgtgaacccgggaggcggaggttgcagtgagccgagatcgcgccactgtactccagcctgggcaacagagcgagactctgtctcaagaaaaaaaaaaaagaaatgagaactacactgagtgtggtaatactgaccctgccacagaaaacttgacatctggtactatggtctctcaaatttaaagctctttcttcctaaggatgaaggagtaagggtgaaaggactgggtagaggctgggacaagggtgggaaaagacctaccctttgagattaaattaagagggtatagggtgtattacctatgctttttttttttttttgaggcagtgtcttgctctgtcacccaggctggagtgcagtggcataatctcggctcactgcaaccactgcctcctgggttcaagcgattctcttgtcttagcttcctgagtagctgggattacagatacatgccactacgcctgtctgacttttgtatttttagtagagatgggttttcactatgttggtcaggctggtcttgaactccctacctcaggtgatctgcccgcctcggcctcccaaagtgctgggattacaggcatgagccactgcgcccagcctgatgtatgctattatatgccaaaatggaaagggtattcagcttctttttatggggaaaatgtcaaattgattcagttaaaatagaagaaatattagtgagtgtatcagtagtaattatgcttgagtagcatgaaatcaaactgaatttgaatcatggctctgctacctgctagctgggtaaattgggcaaattactcaatttctaagccatagtctccttgcctgcaagataggaataatcacaggtcctgccttgcaggattactgtcagggtttaataaagcaaagcatttaaagcacttagcacattgcctagcacacagtcagtgctcactaagtggttgctactattgtggcataagtcttttatttagataacaaagcagcttacattttaatttatatgttattttaagtaatttagttaaaaccaaatctcactttatctaaaaactacaatatgattaatatgatttataattagtgtcactgttattcataaaaactatataaaatggacaaataggtcaatgttatcaggggatacagtaaattagaagcataagaaaaagtttaggataaatcatttataaccttgctaaaagggaataatattgccagagagatactttgtcagggagaattataaaatgagtacattctcctgtgttttgcgttgcccaatccttcaaattgctcaattgagtggttacttctgagtcctcattttgtgtgacttagcagcagcatatgacaaatgatcgccattccctccttgaaacatatccttcacttggctgctaggacaccacatttgcctggctttccttctccctttccgtctgttccttatcagtttttttctgattcctccttatctgcccagcctcttaatattgaaataacccgtggaacactctttagggctcttttctgactacattcactccctaggtgatcgcattcagtctcaagttgagttacaatctatgtgctgatgactcccaaatttgtatctttagtgtgtgtgtccctcctttcaatttcagacccataaaccaactgcctattttttatcttcacttgaatatccaactccacatatccaaaatcagcttcttctgtggccatcaccgtctcagttaatggcaactcttggtattcctgtttttctctcacacataacgtcatgtagttcagcagaaaaccttgtcagttctaccatctctgtgtgtgtgtatatatatatatgtgtgtgtgtgtatgtgtttgtgttccatatatatatgtagagagagagagttcaccatcacccattacacccctatgaccaccatcatcctgcttcaagccagcatcacctctctcctggattgctacaatagcctttgtctccttgcttctactcttgcccctctgtagtttgtttccaacacagcagccaatgtggtcttgttaaaatttaaattagattatgtcatttttctgctcaaaacccttcagtggctttccttttagggacctgggtaaacagcctcctattacctttctgatgccatctcttaccactttctccctggttcatcctgccccagccacagcggtctttctattgaactttaacgcaagctccatgagggcaaggatttttgtccattttgttccctgcatatctccagcatctagaccagcacttggcctaaagtaagcactcattaaatatttcttgaatatattatggacaacttctgaacccatctcttttgcacaattttcccataaaggtcattgtataaggcatcaatgtatgtatcagtctttaccagaagtctgaggtaatgatgagatatttgttcatcatcatgttatttaatgtgtttcttcctcaagattactgacacatttccccaattccccattttcctggttgctgtcatcctctgactcattcccttccccagaacttgattcctttgtttatcatacagtgtaaaacagtcctcttctcctgtgctggactaggtctggaaaagtttaatccatggcttgggaaaaaaagactggaaaaatggcattttcctgtttcctttttaaaatttcagtgctttgatgtttgattttaaaaatcatcgcaaggatagttctaggggcaaaacttaaagttggctttgttaaggtaacaccaattgccgtaatacataattctccaaatttcagtggctttacacaaaaaggacttttgcttgcttcatgcacatctagttccaacagtcatttctgatcactgggcctctaagtggctccttcaataatgcaaacctgccatcatgcaagtttgctgtggaagagggaaagagtatagaatattattgagggatgttttataggacatgtttgtgactatacatccactactattttactgtccagaatttggtcatacctgaatgctggcaagtttggggcatgtgattcacatgtatacctaggaagaagcagaaacaagtttggtgatgacccatccagagtctctaccaaactttgtattgccacactttctctctcactccttattcataagcctctgatgtgtggatcctcttcttgcttggtgttggatggaatcataatagtaatagtataaataataaatattttctgctattcactgcttatattatttaattatcaaaaactgtgaggtaggtctacttatcaccatttatagatgtggaaattgaggcattagtgtgtctaacgtcactaacttgtaagagttgaaaccaagatttgaaccaggctgtctgacttcacaatccacctccctaacaaggacactgtattgcctctcaagttttgaagagttagacctcttttcccttattatattgcttcttgaggagccaggatgaacctggaaggaactttgggaccccatttcaacttcaaatttcctccattcatttgctgatttgacttctacacttatgtctccaattcttaaccagaatgactcagggcctcccagttctcagatcagtttcagacagagtggcaacttgaggctaaagggtgaaggaatggagccctgtttgtgtaagaattctctcagagtatttcattgtgggcacttttcacagttccaactctcctaattgaaacacatttcaccaaacactccaagtgatatggtaattaaaattaaatctgttgccaaaaaaggcaaagaaaatagtataagcagtctataaactattataatatcacctgctaaagatatttattctggagaaaacaatgcctataacttataaactgatacaacagagtgctattttttagttttatcggagccaccaaaatacaatatatatcagatactgaaatgacttagaagatatcaagatgcagattttcttttttattttttcctttttttgagatggagtctcgctctgtcgcccaggctggagtgcagtggtgctatctcagctcactgcaacctccacctcccgagttcaagtgattctcctgcctcagcctcctgagtagctgggattacaggcacccaccaccacacccagctaattttttgtatttttagtagagatggtatttcaccatgttggccaagctagtcttgtactcctgaccttgtgattcacctgcctcagcctcccaaagtgctgggattacaggcgtgagccactgcgcccagccgatgcagattttcaaaggaaatgttcaactaatggatttcatcccccaacaagtgtattcaaaagtcaggtttttcgagattaaagattttgtgaggacaatttctttggaaaatagcatctgctgttatttgccaccttttatcccatggcaagggagggaagtatgtgtgtacgtacacgtgtgtgtgtgtgtgctgtgactttcttcacacactgcctataggaagaggcctcagaggagactctaggagtttattgtctcccccagacttgggagagtacagctagctcatgtctgatgtccacctgaggtatctgaaagtgaaaagctgtcaaaaagggcctttggaagctaagtagagggctgtgtttgggctgtaactgaactctactccagatgggccaaaggtctgtgactcctggggaccagacatgggacccagagaagcagacaccactgtccaaagtaattttgactcctgcttgagaggactgccagagaccgcagagcaacttcagcagtctttgagtaatggaagatgggaaaactagaggctgagggggaattagctgctggagggttagaatgaatagtccatgtcaccggagttacaatcaaaagaggacagtagaagagcacttgagaacccatgaaaatgtgtgtgtgtgtgtgtgtgtgtgtgtgtgtctgtgtctgcatgtgtgtatctgagagagagagagatgtaaacatctgcgaggccaagagagtgtgaagccattttacaatagtattagtcaagtgagaactttgcagcccgtctttcccacatctctctttcatttagaccctagagaggtcagattaccacagtccaaagtaggggaagagggatggtagtctaacctttgaataaagattcaattgctgtttaatttgttagacaaacttcagtgtactaaattgagactctgttcagcaactaatgtctttttattacctatgaatgtccagagatgtcatggagcctgccagagttttcattcgttggaaagggaaaaactttccctagtgaatggattttttaaacagtggggccaggcgcggtgactcatgcctgtaatcccagcactttgggaggccgaggtgggcagatcacttgaggttaggagttcaagaccatcttggccaacatagtgaaaccccatctctaccaaaaatacaaaaattagccaggcatggtggtgcatgcctgtaatcccagctactcaggaggctgatgcaggagaatgtctttaatctgggaggcagtgagctgagatcatgccactgcactccagcctgggcaatagatcgacactccctctcagaaaaaaaaaagaaagaaagaaagaaagaaaggcggtgagagacaaacataacattgactttggattttatcacatgatttacattcatgattacatctcatcatgcagtgcgttgattgtgcttgttatacggaatgtattgctcctcagcaaatatggattttctaatatcactaatttttaattcagaattaatatttgaatgtattaattttctgccttttagagagtaatggagtattgtataactcattgaggattgatcggtatgtaccttaaatcttaaacaatttgagaattattaacaaatctataattaagtctaccacttagagaatcttttctctggcacaataggaaagttaggttctagttgaagaaactgaagaaagaggaggcagttttgaggtctttatttggccattagcttgctttaactaagaaggtttttttttcctgtgctttttttacccccttatctgagtccttgtaaaaagaaacaatatcctcagtgtatgctaaatgcttgacagattaatttttctgcatcacaattgaaaaagttgctcttaaaccagagaaatgaatagatggttctttgtagacttacttggcattgttttcaaggagtttctctgaccatgtcacatagtggatcaatcaacagactttttcagcatccactaaatacttattattgtgcttggcaccacaggatttggaattcagtccaaataaattcaatagattataattgagtactatcccatgttagacactgtgctaggctctgagaaaattagcatgaatgattaaacccaaggtatgtagtctggttgtgaaatacatgtataactaatactgtacatagtgggatgaatgtcaaatgtggagtacaaacaaagctgagtgttagtagtgatgaggaaatgattcattctaactgaaaagattgaggactacaaaataataggtatcatttatgaataacccgagatggtacaggtactctataaagaattgatatttataagtccccttgggatagttttcatatcctcattttattggttagaggattcagaaaacttaagcagcttgtccaaatcacatagctagtagttatcagaatcagcaactagaatctgagtctgtttgatttcaaagcctatgttcttattagcaacactgtgacatctgtgcttgcaggggatcatttcagattaaaaggagcagtgtaaataaaggtacaggtttaagaaggaagtgttgacaggtaggttgtagtccattgtgactaggcatggcttagaagccctggaaagactgaaggcatattgtggaagattttgaattctatgctaagagattggactttattctaggtatagtcactaaaaaattataaaaaacaaaaaagacaaatagacaatgacaatatctaataggtgctaattatctgatgcaaatcagtgtatctcaatgtaatttaaaaattgtgctattattaatacaatgacaatattaaaaaataatacgtcatctaaatcaccttataactgagtccaccactgcaactgtttgcttttctgttcatatgcatgttggttctaagaagtacacattgggctaatgagaatagaacagaaacaaatttcatgtgtaaatgacaccattttaggaagtgaacgtcaaatgatgttagactgcacacactgaacaaataatgtgttcatattaatgaggagagagaaaaggagtgagagacgcttatcacctcacagctcactgtggcctatgcacaacaggcttctaggtcttgcatcagcctcatatcttcagtgggagtagttagcagaagtaaaaatcacattgagttaatgttaatttgaaatttattgattttggtatttaatatataactttgctttggtttcataattacataaatgttatgaccctaaggagtttataacattttaagttagcatggatttaaatacaaatatgctatatagttatacttaaggctaacatgggagacccagaaacgtgtttttctcttaagtttgaaaaatacttcatgaacaattcctactgagaaacattaacatagtacctgaaggaaaaggggctagaaggtggggacgaattccgaatgaaataggattataagcagaaacacagaaacaggaatgaagagatggttacactagagcatgaagttcgttttgtggtaagtaggcaagagagccagacaattaagaaactcatatcactgaagtttcatatcaccatagaaaggggtcaatatggactcttcaggaagataatgaaaatgtgacttaatttgagttacccccaaaacacactctgagaagaggatttgaatgaaggagttttttggggggctggtcccaggaagcactggtagaggcttggtgaagtgagacagaggaggaagggaggaccataaagagtatgttacctggccgggtgcagtggttcacacctataatcgcagcactttgggaggctaaggcaggtggatcatctgaggtcaggagtttgagaccagccaggccaatatggcgaaaccctgtctctactaaaaacagaaaaatttaaaattagccgggcgtggtggcacatgcctgtaatcccagctactcaggaggctgacacaggagaattgcttgaacccaggaggcagaggttgcagtgagctgagatcatgccactgctctccagcctgtgacagagagaaactgtgtctcgacaaaaaaacaaagtgtgttaccccaagcatgttacctctgtgggtcactagagcttaatcccactgggaactctgggagcaaatgcagaacatgtgccttggggctatcccttcaatggacagagaggctggaatgcttattcgccttcttccaccagcatttggttgagagatttcccagggcacgtagactcagcggcaggcctagcctgaggcataagaaacaaggcagtggctggaggccaaagaaagcccccaggcagagcaatgcaggcactggcagttggaagcagggctgtgtgcaagaaagtggtaaggccaagggaatatgggaggagcgtccagtgtctgctaagtgaccttttacctttttaagactgtccattttgtggacaaaggacactgacatttcagagtttctgtcatgtgccttgaattatgctgaacacttttacatttgaattttataaaaattctgtggtatatttattttctccatgagggggtggaggggatctccaatagcacataaagctcacgctcagaaagtttagtacctcttgaaggtgacactgctgagtcatgttgaagttagaattgggagaggattttgaacccaggtatttctgacccagaggcttctgattcttctatctactgatggaatggagaaactagaaagagtttggaaattacaaggatagaagataataatgaatttagattgtgccctatttttcatttatatgtttattaagaaattaatttttttctttattctaattgcacatggctaataacagtctcattttcaatgtgttaaataataaggtttttgtgtccttgagtatttattttggagatacatgacatagaaacatcttaacatttagggataatattcttttatgatagtgtttctcatagttaatctgaagtttttaatagaatcagtaataataatgacaatatccatcttatattattcttgtaggacttttcattataccaaataaattactaaattaattttagtgagtcattacaataggtatgtgacaccagtaacagtcttattattaccaacttaagaagaagctaaagttgaactcagtggcttgtctgatgtaattcagctcatctttgatgaagtcgggtctgagaactgcattatttccggatttgtttgtggaatgcaagtgtagctccctttatacaatgtgcagttctgaaaaagtgaattgttattactacaaatcttattattcaaagcaatcctattgtgaatcctttggtaaaccgaatagcttgtcttttgttcaaatgtggattttttgcatttagatttgcctgaaagtaaagagtactttggccatttttgccttggaaatcattatatttgtttcttgatgcacatcttacatcttgaggttttcctcttatggcagtcatagagattttcctttgaatgtgtctttccacttacggttgctgcaatctcctgcagcatttgtactggttggtatcatttctcaactattgatttcaattaccttatctaggtccttaggacaagaagtgagaaatatgatacccaactctaaagaaagaggttttgaagggaaatgtgctggaatgtggatagagcttttttctgttctaacatgagaatcaggactacctacattcattgatattggtgctgatagtgttattgcattcctatggacattaagaccaccaaggcctgcatatgacttgtactttcaggcctgagaatgcttgtagtttgtcagcggtttgggaatatggttcccctctgatgtgtgtccctacttagccctgtggatttaggctcctcttcttgaaatggtgccatctatctttgatcactgctgtcatttcctaataacccacagcttcagactgtttggctgtgttgctttggagtgctttttttcctgcttaccttgcatgtggttgttccagttcatctcatctgactatataagcagttacttaggaattctgttgtaatctgtctttgcattcctaacctcgtgaaactgaggcatatgcagcatgcttcagtgatgggaagttgatcaaatgctttaagtacgtgggattcattgatgtgtcgaatgttggacataagcaaccttcattctgccccttcatcttattttatattactttaaatagtagaatgtactgtattcctcgttataaatggaaatcttagaacttgataaaaatttaaaagaaattacctatagatccactacctaaagaatgccactcttaacagttttttccatttaattacctgtgtccagttcattaaaaatacatttatagcctatatataattttatattttgcttcttatatttaacaggacatgattggcatttctgaatgtatataattcataagtataattttaatatttatatactatttagaaagagttttcataccttaatttatttaaccaaacccctattacattatgttttaaatatttcaatgcatatcaccaaattgtcttccaatagtgtaataaaaattcacattcttattagcaatgtatgatagtgtctattttactgaaccttgttcctctatagctattctaattaataccattgtttctggtaatctgctggacaagaaatgccatcttcttattttaaattgcatttattaggcttatagcaaggatgaaaaattgttgtatgtttttaaaattctattctttcttataaaatttctatttatattctctgttcatttatctattagtttctcagtggttttcttattggtatgtatgagtaattttcatagtaaatatattactcctttaccatatcaactgtatatatttttctagttcttatttttaacattcaatagctgtaaatttttatgtagctagatgtatgatcctttattccacatgagtttttttttttgtttgttttcccagtgaggaaagtattcagctctaagtaacagaattcctaattaacagtgacttacacaagagagtggtttatttttcttgcataaacagaagtctggtggtaggttgtaacagcagtggtttagtttctcagtaaaaccgttttagaaccaggcttttttttctctttgttctatcatcttttatcattatcagatttttaaaaatatataagcaacttcttcattaagaaagctaaggcccagagaagttaagtgatttgtccctgctactcagctaatggagtttcctttttctgtctctacactctttttttttttttttttttttgagacggagtcttgctctgtcgcccaggctggagtgcagtggtgagatctctgctcactgcaagctccgcctcccgggctcacgccattctcctgcctcagcctccctagtagctgggactacaggtgcccaccaccacgcctggctaattttttgtatttttagtagagacggggtttcaccgtgttagccaggatggtctcgatctcctgacctcgtgatccgcctgccttggcctcccaatctgtctctacactctttctgttgcactgtgctgtcgcatatcttgctgtgcatttcacattggtacctgctattggcatacaaaacacatacaaatatgacttcgctctgtactccctcaagaggtgtccaggcaatattatgtattagcaattaacacctcagctattaaattcttttataataaaccataatttaaaataacatgggaattcagtatctgctaagttgaaaactttatttactctcattgtatttttgcagatgtgacagaactttttgatagaaagagctcaaatgtttaagagcatggttcaattcttattttatgtattaaaaactaatttgtagcaggagatcctgaaacctactgaagtgaaatatcagacaggctttgatcaacgaaagaaagaaatactctcatcaatctttgtaagcctctcattggtaaatctaaatcaacatatataaagtctatatctgtgcaaagcattcaacctgcccctgtggtaactgagctcgtaaattagttgaggagacaagagcaatagataatatttaatccacaaaagatgtaaacagtagttgaaagcaactataaattaaatgccacagagtagggcatgtctactttctaagcaatagaatacataatattttcttaacttcacttgtctatgaaccaacatcattattttttgccctaactataaagtttatttaaatattaatatattttttctttaaaataactttgaagcaatttagtttataaaacttaatcttgctgagtgataatacccatgaactcatgaattcaatcttctagctgtacttttttgtttttaactgtacatattttaacacattaaaataaatgtattaaaaaaatggtcttcatgtatcatctaaaaattatcttatgtctcagtctttgggaaacactggcttaaacaatcaattactagggagttcagatgaggaacaatagaacaaatttgcagtgattctattaaaatatatgaattaaagaattctcttgttcccctaaggccataatcaaaattatagttcagatatattgtctgctaggtaatagcatattaataaggatttcttatgtgttcatagatattttatataatttagctttaaaaacagccttcagataacagtctttcatgagtgttgaaaagacttcagtttcattcttaatctttcagtaatagatcccaggagtgaataaggttacgcatttcacttttataatcatctttgctcagtctgctgaaggtaggaatgccttaatatggcatagcacagtattttttctaggctgctttataatttgttgagaatgattgcaaatcttactaaaagcaattcagatacttcaaaaagagctcatcattcatgattaaagacacataagcctaaagaagtatctccagctaattttgaagaatcattaaaatattttgggaatcagccctcttaaacaaatataacaaaatttagaattctgtttacacttagacatttctaggcttatattcattagcccataaaatccagactatagattaaagggaaacattttaaaatgttagctgttttgaatggaaatctttctaaaatatactatgcaattctaggcctgatagtgaacaaaacatacattttctttaagactcaggatctttttttttttttttttttttgagactgagtctctctctgtcacccaggctggagtgcagtggtgcgatctcggctcaatgcaagccccgcctcccgggttcacgccattttcctgcctcagcctcccgagtagctgggactacaggtgcccaccaccacgcccggccaacttttttgtatttttagtagagacggggtttcaccgtgttagccaggatggtcttgatctcctgacctcgtgatccgcccgcctcggcctcctggtttccgttggactttattttgcagctattatgcttgtctccctaatacgcctctacttttactatccttcttcaaatgtgttactcgcagtattctaagacctcagaattacatagtggagtttgttaaaggtatcattatagcatcagaaagtggagacatcaggggcttttttcttcctacttctaattcagggtagtgttgtgaatggttgcagttgtgagaggattaaagattcattaagtgagctgtttagtgaactattttctagtttttattagttttgattctgaatgatgatcgctttattaatgcttcatcaacacactgggatttacagctttcaaaggttacttttatatgcaagattggatttggtctagactgtctgagtttactaatgtttaccatcttgagaactgataaagtgaagacattcaccaaacacttagaaaattttaaagacataccttttaactggctatgacatagcaaagaaatattctctttcttttacaactctgctatttagattctatccgtttatacttctcatcttagttgcatacaaaaattcacatgtgtacacactccccccgtacacatacagagaacaataacttttattatttcattcattcccttggggatcaaatatgtgtccaatgagaagatccaggatgtcatactaccatataccaaggagacctttgttggggaaacaagttgagaaatgatgatccgttaatgatgtccacagcgggggctgcaagacatcttactgacaagagaggaagaaaatactggaagtagtacttatatttatatcataaattaaaagtcagagggctgggatcatgcctgtaatcctgacactttgggaggccgaggtgggtggatcacttgaggtcaggagttcaagaccagcctggccaacatggtgaaacctcatctctactaaaaatacaaaaaatttgctcggtgtcattgcacgtgcctgtaatcccagctacttgggaggctgaggcaggagaattacttgaacccaggaggcagagtttgcagtgagcagagatcacgccattgcactccagcctacatgacagaacaagactccatctcagagaaaagaaaaaaaaaaagagtaaataaagacttactagtaatcaatatccagagcttacaatttagatatttagatgaggtatcttaaatgaagactatttgacaatccagtggagttcacagaagttccttctttaaatattaactttccaattattgaaatattttatgattgtggcatattttaacatatttcaacaagatgatataatgttaattttatacaagtaagactttaaaaattatggatcattagaatactttttaatgagatgaggaatgactgggaaaatattttgaattacattgaggcccacagtttttctggtgacaaagttcttgaaaatgttatttaagatgagttatatagatttacacaaaagccaggcttctgatttggttgatgttttctgtggccatctgtggcagtcagaaagcagttattttggcatgaggttcagagagcttctaggttggtgagcacatggaggtgctgtgagtgtggtgtactctgagagggcatgaaagccccttcccctttactttggcctatggatcccatccatttggctgttcctgagttgtatcctttacaacatactactaaatataaaagaagggaaaaaaaaggcaagcagttatgttgaaaaacctgaaatatactgaattagtctcaaacacaataaagtcaatgttttagtaatgagtgaaaaattaagtgcttttcaaaaggagcccatggagaaagcattctgaaatggctatttggcaaggctgtcatcattttgttttactgtatgttcttttcttaaggatctttgaattgtagactagtttacatactttataaataatctaggttaatattggcaacacatgtaacagatattatacttttataattattcagaaaattatatatacctttaatccctccccaatactcactttaataaatattaatttattaccaaaagaaggtgtgagatctaagaactctgagtcttgtagcaggtaagacatttgtaagggctacttcttaataaaattttccatttcctttagatgtttctaaaattagaagttttaaaatatattcgtttgatgtgattacttaggggctcaagcagagaatttagattgattgggcttgcaataaaaagggactttaaaaaatgacatcatcagaaagaaggcaaataatcagctctttctggatcaggaaggggaattctgacaaatatttatacttatgagacatatacatgggtgcaagagaagtgacatcggaagaaaaagtacacatttttgtatttaaaaatctatcaatattatatatgaacatctgaaagatatttatatataaatatacatgtaaatattatggcatataaacagatttatatatgtgtgtatgtatgtaggtaggtatctacctatggaatatactttttcttcagaagtcagttcttttgctttaaaactttctcctttaggaaaaaaattaacactgaattttaccagttctaatttttttttactttaggtttttgtttatctaaatgttataaataatgagcacaaaataattttatgattattatttcatggatctgtttctgatagatttgttaaattatactttaagttctgggatacatgtgcagaacatgcaggtttgttacataggtatccacatgccatggtggtctgctgcacccatcaacccgtcatctacattaggtatttctcctaatgctatccctcccctagtctctcaccccctgacaggccctggtgtttgatgttcccttctctgtgtctatgtattttcattgttcaactcccacttatgagtgagaacatgtggtgtttggttttctgttcctgtgttagtttgctgagaatgatggtttccagctccatccatgtacctgcaaaggacatgaactcatccttttttatggctgcacagtgttccatggtgtatatgtgccacattttctttatccagtctatcattgatgggcatttgtgttggttccaagtctttgctattgtgaatagtgctgcaataaacatacgtgtgcatgtgtctttatagtagaatgatttataatcctttgggtatacacccagtaatgggattgctgggtcaaatggtatttctggttctagatccttgaggaatcgccacactgtcttccacaatggttgaactaatttacactcccaccaacagtgtaaaaaccttcctatttctccacatcctctccagcatctgttgtttcctgactttttaatgatcgccattctaactggtgtgagatggtaacccactgtgattttgatttgcatttctctaatgagcagtgatgatgagctttttttcatatgtttgttggccgcataaatgtcttcttttgagaagtgtcagtatgatattggctgtgggtttgtcataaataacttattattttgagatacattccatcaataccaatttattgtgagtttttagcatgaaggggtgttgaattttattgaaggccttttctgcatctgttgagataatcatgtggtttttgtcattggttctgcttatgtaatggattacgtttattgattttcatatgttgaaccagccttgcatcccagggatgaagccgacttgatcatggtggataagctttttgatgtgttgctaattcagtttgccagtattttattgatgatttttgcattgatgttcatcagggatattggcctgaaattattttgtcattgttgtgtctctgccaggttttggtatcaggatgatgctggcctcataaaatgagttagggaggattccccccttttttttttatcgttcggaatagtttcagagggaatggtaccagctcctctttgtacctctggtagaatttggctgtgaatctgtctggtcctgggcttttttgggttggtaggctattaattactacctcaatttcagcacttgttattggtctattcagggatttgacttcttcctggtttagtcttgggagggtgtatgtgtccaggagtttatccatttcttccagattttctagtttatttgcatagaggtatttatagtattctctgatggtagtttgtacttctgtgggatcagtggtgatcgcccctttatcattgtttattgtgtctatttgattcttctgtcttttcttctttaacagtctggctagtggtttatctattttgttaatctttttaaaaaaccagctcctggattcactgatttttttgaagagtttttcttgtctttctctccttcagttctgctctgttcttagttatttcttgtcttctgctagattttgaatttgtttgctgttacttctctaggtcttttttttttattatactttaagttttaggatacatgtccacaacgtgaaggtgcaggtttgttacatatgtatacctgtgccatgttgttgtgctgcacccattaactcgtcatttagcattaggtatatctcctaatgctatcctttcccccacccccaccccacaacagtccccggtgtgtgatgttccccttcgtgtgtccatgtgttctcattgttcaattcccacctatgagtgagaacatgtggtgtctggttttttgtccttgtggtagtttgctgagaatgagggtttccagcttcatccatgtctctacaaaggatatggctgcatagtattccatggtgtatatgtgtcacattttcttaatccagtctatcattgttggacatttgggttggttccaagtctttgctattgtgaatagtgctgcaagaaacatacgtgtgcatgtgtctttatagcagcatgatttataatcctttgggtatatacccagtaatgttgggtatatacccagtaatgagcatggaatgttcttccagtaatgggatggctgggtcaaatgctatttctagttctagatccctgaggagtcgccacaccgacttccacaatggttgaactagtttacagtcccaccaacagtgtaaaagtgttccgatttctccacatcctctccagcacctgttgtttcttgactttttaatgattgccattctaactggtgtgagatggtatctcattgtggttttgatttgcatttctctgatgaccagtgatgatgagcattttttcatgtgttttttggctgcataaatgtcttcttttgagaattgtctgttcatatccttcacccactttttgatggggttgtttgtttttttcttgtaaatttgtttgagttcattgtagattctggatataagccctttgtcagttgagtagattgcaaaaattttctcccattctgtaggttgcctgttcactctgatggtagtttcttttgctgtgcagaagctctttagtttaattagatcccatttgtcaattttggcttttgttgccattgcttttggtgttttagacatgaagtccttgcccatgcctatgtcctgaatggtattgcctagcttttcttctagggtttttatcattttagatctaacatgtaagtctttaatccatcttgaattaatttttgtataagttgtaaggaagggatccagtttcagctttctacatatggctagccagttttcccagcaccagttgttaaacagggaatcctttccccatttcttgtttttgttaggtttgtcaaagatcagatagttgtagatatgcggcattatttctgagggctctgttctgttccattggtctatatctctgttttggtaccagtaccatgctgttttggttactgtagccttgtagtatagtttgaagtcaggtagcatgatgcctccagctttgttcttttggcttaggattgacttggcaatgcgggctgtattttggttccatatgaactttaaagtagttttttccaattctgtgaagaaagtcattggtagcttgatggggatggcattgaatctataaattaccttgggcagtatggccattttcacgctattgattcttcctacccatgagcatggaatgttcttccatttgtttatatcctcttttatttcattgagcagtggtttgtagttctccttgaagaggtccttcacatcccttgtaagttggattcctaggtatgttattctctttgaagcaattgtgaatgggagttcactcatgatttggctctctgtttgtctgttattggtgtataagaatgcttgtgatttttgcacattgattttgtatcctgagactttgctgaagttgcttatcagcttaaggagattttgggctgagatgatggggttttctaaatatacaatcatgtcatctgcaaacagggacaacttgacttcctcttttcctaattgattgccctttatttccttctcctgcctgattgccctgaccagaacttccaacactatgttgaataggatggtgagagagggcatccctgtttgtgccagttttcaaagggaatacttccagtttttgcccattcagtatgatattggctgtgggtttgtcatagatagctcttattattttgagatatgtcccatcaatacctaatttattgagagcttttagcatggagggtttttgaattttgtcaaaggccttttctgcatctattgagataatcatgtggtttttgtctttggttctgtttatatgctggattacgtttattgatttttgtatgttgaaccagccttgcatcccagggatgaagcccactagatcatggtggataagctttttgatgtgtcactgggtttggtttgccagtattttattgaggatttttgcatcaatgttcatcaaggatattggtctaaaattctctttttttgttgtgtctctgccaggctttggtatcaggatgatgctggcctcataaattgagttagggaggattccctctttttctattgattggaatagtttcagaaggaatggtaccagttcctccttgtacctctggtagaattcagctgtgaatccatctggtcctggactttttttggttggtaagctattaattattgcctcaatttcagagcctgttattggtctattcagagattcaacttcttcctggtttagtcttgggagggtgtatgtgtcgaggaatttatccatttcttctagattttctagtttatttgcgtagaggtatttgtagtattctctgattgtagtttgtatttctgtgggatcagtggtgatatcccctttgtcattttttattgcatctatttgattcttctctcttttcttctttatgagtcttgctagcggtctatcaattttgttgatcttttcaaaaaaccagctcctggattcattgattttttaaagggttttttgtgtctctgtttccttcagttctgctccgatcttagttatttcttgccttctgctagcttttgaatgtgtttgctcttgcttctctagttcttttaattgtgatgttagggtgtcgattttagatctttcctgctttctcttgtgggcgtttagtgctataaatttccatctaaacactgctttgaatgtgtcccagagattctggtatgttgtgtctttgttctcgttggtttcaaagaacatctttatttctgccttcatttcgttatgtacccagtagtcattcaggagcaggttgtttagtttccatgtagttgagcagttttgagtgagtttcttaatcctgagttgtagtttgattgcactgtggtctgagagacagtttgttataatttctattcttttacatttgctgaggagagctttacttccaactatgtggtcagttttggaataggtgtggtgtggtgctgaaaagaatgtatattctgttgatttggggcggagagttctgtagatgtctattaggccctcttggtgcagagctgagttccattcctggatatccttgttaactttctgtctcattgatctgtctaatgttgacagtggggtgttaaagtctcccattattaatgtgtgggagtctaagtctctttgtaggtcattcaggacttgctttatgaatctgggtgctcctgtattgggtacatatatatttaggatagttagttcttcttgttgaattgatccctttaccattatgtaatggccttctttgtctcttttgatgtttgttggtttaaagtctgttttgtctgagactaggattgcaacccctgcctttttttgttttccattggcttggtagatcttcctccatccctttattttgagcctttctgtgtttctgcacatgagatgggtttcctgaatacagcacactgatgggtcttgactctatccaatttgccagtctgtggcttttaattggagtatttagcccatttatatttaaggttagtattgttatgtgtgaatttgatcctgtcattatgatgttagctggttattttgattgttagttgatgcagtttcttcctagtgttgatggtctttacaatttggcatgtttttgcagtgcctggtaccggttgttcctttccatgtttagtgcttccttcgggagctcttttagggcaggcctagtggtgacaaaatctctcagcatttgcttgtctgtaaagtattttatttctccttcacttatgaagcttagtttggctggatatgaaattctgagttgaaaattcttttctttaagaatgttgaatagtggcccccactctgttctgacttgtagagtttctgctgagagatcagctgttagtctgatgggcttccctttgtgggtaacctgacctttctctctggctgcccttaacattttttccttcatttcaactttggtgaatctgacaattatgtgtcttggagttgctcttctcgaggaatatctttgtggcgttttctgtatttcctgaatttgaatgttggcctgccttgctagattggggaagttctcctggataatatcctgcagagtgttttccaacttggttccattctccccgtcactttcaggtacacaaattggacgtagatttggtcttttcacatagtcccatattccttggaggctttgttgatttctttttattcttttttctctaaacttctcttcacgcttcatttcatttatttcatcttccattgctgataccctttcttccagttgattgcattggttactgaggcttgtgcttttgtcacgtagtttttgtgccttggttttcagctccatcaggtcctttaaggacttctctgcattggttattctagttatccattcgtctaattttttttcaaagtttttaacttctttgccattggttcaaacttattcctttagctcaaagtagtttgatcatctgaaaccttcttctctcaacttgtcaaagtcattttctgtccagctttgttccattgctggtgacgagctgcgttcctttggaggaggagcggtgctctgatttttagagtttccggtttttctgctctgttttttccccatctttgtgattttatctacctttcgtctttgatgatggtgatgtacagatgggtttttggtgtggatgtcctttctgtttgttagttttccttctaacagtcaggaccctcagctgcaggtctgttggagttttctggaggtccactccagaccctgttttcctgggtttcagcagtggtggctgcagaacagcagatattggtgaaccacaaatgctgctgcctgatcgttcctctggaagttttgtctcagaggagtacccggctgtgtgaggtgtcagtccgcccctactcgggggtgcctcccagttaggctactcaggggttggggacccacttgaggaggcattctgcccattctcagatctcaaactgagtgctgggagaaccactactctctttaaagctgtcagacagggacatttaagtctgcagaggttattgctatcttttgtttgtctgtgccctgccccccagaggtggagcctacagaggcaggcaggcctccttgagctgtggtgggctccacccagttcgagcttcctggctgctttgtttacctactcaagcctgagcaatggcaggcgcccctccccccagcctcgctgccaccttgctgtttgatctcaggctgctgtgctagcaatgagcgaggttccgtgggcgtaggaccctccgagccagttgcgggatataatctcctggtgtgccatttgataagcctgttggaaaagcgcagtattaaggtgggagtgatccgattttccaggtgccatctgtcacccctttctttgactaggaaaaggaattccctgatcctttgtgcttcccgggtgaggcgatgcctctccctgctttggctcacgcatggtgcgctgcccccactgtcctgcacccactgtctggcactccccagtgaggtgaacccggttggaaatgcagaaatcacctgtcttctgtgtcactcaccctgggagctgtagactggagctgtttctattcggctatcttggctccaccccttctctagttcttttaatagtgatgttaggatgttgattttagatctttccagcattctcctgtgggcatttagtgcttcacatttcccctaaacactgctttagctgtgtcccaaggattctggtacgttgtgtcattgttctcattagtttcgaagaacttatttatttctgccttaatttcattatatatccagcagtcactcaggaacaggttgtccagtttccatgtaggtgtgtggtttttaatgagtttctttatcctgagttctaatttgattgcactgtggtctgagagactgtttgttatcatttctgttcttttgcatttactgatgagtgttttacttccaataatgtggtcaattttagaataagtgtgatgtggtgctgagaagaatgtatattctgtagatttggggtggagagttctgtagatgcctattaggtctgcttggtccggagctgagttcaagtcctgaatatcctttttaatttcctgtcttgttgatctgtctaatattgacagtggggtgttaaattcatccactattattgtgtgggagtctatgtctctttagaggtctctgggaacttgctttatgaatctgggtgctcctatattgggtgcatatatatttaggatagttagctcttcttgttgcattgattcctttaccattatgtaatgcccttctttttattttctgatctttcttcgtttaaagtctgttttatcagagactaggattgcaacccctgctttttttttttttgctttccatttttttgggaaatcttcctgcattcctttattttgagcctctgtgtgtctttttttgggggggggcgttgggggcaccgtctcactctgtcaccgaggctggagtgcagtggctcgatcttggctcactgcaacctccgcctcccgggttcaagcaattctctgcctcagcctcctgagtagctgagattacaggcacatgccaccacacttggctaactgtcgtatttttagtagagttggggttttatcatgttgaccaggctggtcttgaactctagaccttgtgatccacccgccttggcctcccaaagtgctgggattacaggcgtgagctgtcacgcccagcctctatgtgtgtcattacatgtgtgtcattacatgggtctcctgaatacagcaccccgatgggtcttgactctttatccaatttgtcagcctgtgtctttgaattggaggatttagcccatttacatttaaggttaatattgttatgtgtgaatttgatcctggcattatgatgctagctggttattttagttgatgcagtttcttcatagtatcgatggtctttacaattcggtatgtttttgcagtggctggtatcggttttttctttccatatttagtgcttccttcagcagctcttgcaaggcaggcctggtggtgacaaaatctctcagcatttgcttgtctgtaaaggattttttttctcctttgcttatgaaccttagtttgcctgtatatgaaattcagggttgaaaattgttttctttaagaatgttgaatattggcccccactctcttctggcttgtagggtttctgcagagagatctgctgttagtctgatgtgcttcactgtgtgggtaacctgacctttctctctggatgcccttaacattttttccttcgtttcaaccttggtgaatctgacgattacgtgtcttggggttgctcttctcggggagtatctttgtggtgttctctctacttcctgaatttgaatgttggcctgtctagctaggttggggaagttctggataatatcctgaggagtgttttccaactgggttccattctccctgtcactttcaggtacaccaatcagttgtaggtttggtcttttcacatagtcccatatttcttggaggctctgttcattccttttcattctctttttctctaatcttgtcttcatgctttatttcattaagttgatcttcaatctctgatatcctttcttctgcttgatcaattcacctattgataaggtatcatgcttcacgaagttctcgtgctgtgtttttcagctccatcaggtcatctatgttcttctctaaactggttattctagttagcaattcctctaaccttttttcaaggttcttagcttccttgtattaggttagagcacgcttctttagctcggaggagtttgttatttctcaccctctgaagcctacttctgtcaattcatcaaactcattctccatccagttttgttcccttgctggtgaggagttgtaatcctttggaggagaagaggcattctggtttttggaattttcagcctttttgagctgttttttattcatttttgtggatttatctacctttggtctttgctgttggtgaccttctgatggggtttttgtgtggacatcctttttgttgatgttcatgctattcctttctgtttgttagttttccttctgtcaggctcctctgctgcacgtctgctggggtttgctggaggtccactgcagaccctgtttgccggggtatcaccagcagagaccgcaggacagcaaagattgctgtcttttccttcctctggaagcatggtttcagaggggcatctgccagatgctagccggagctctcctatatgagatgtctgtttactccctctggaaggtgtctcccagtcaggagatacggggatcgaggactcacttggggaggcagtctgtcccttagcagagctcaagtgctgtgctagaagatcttctctcttcagagctagcaggcagtaacgtttgtctgctgaagctgcgaccatagccgcccctacccccaggtgctctgtcccaggaagatgggagttttatctataaacccctgactggggctgctgcttttttttcagagattccctgcctagggtggaggaatctagagaggcagtctggctacagtggctttgccaaactgtggtggactctgcccagttcagacttcccggtggctttgtttacactgtgatgggaaaactgcctactcaagcgtcagtaatggtggacgccccttcccccaccaagctcgagcatcccaggtcagcttcagactgctgtgctggcagcaagaatttcaagccagtggatcttagcttgctgggctctgtgggggtgggatctgctgaactagaccacttggttccctggcttcagccccctttccagggaagtgaacagttctgtcttgctggcattcgaggtgccactggggtatgtaaaaaactcttgcaggtagctcggtgtcttcccaaaaggccgcccagttttgtgcttgaaacccagggccctggtggtgtaggcacctgagggaatctcctggtctgtgggtttctatgaccatgggaaaagtgtagtatctgggcgggaatgcactgtccctcagggcacaatccctgtgggcttcccttggctaggggagggagttccccaaccccttgggcttcccggatgaggcaacgctccaccctgcttcggctagccctccgtgggctgcacctactgtctaaccagtcccaatgagatgagccaggtacctcagttggaaatgctgaaatcacccgccttctacattgatctcactgggagatgtagaccggagctgttcctatttggccatcttgccagccctttctgatagattttgacatgctgaatgacaacagcattatgagccttttcttatttaaatactggcattatgccttctatgtgaggtttaatgggcttcagttacaatagagggttcctaggggcattattaacatttagaatgatgtctctaagtagtatctttgctgcttctgttaattgatggcactgttatcatgaattatggtgcaacattctaagcaacaaaataaaagttcatgcgaattttactaatttttgtttcattgatttatgaattcaagcatacaaatgttaaaacaaaaatgaaccttaggagtgccttctaaggttctaaggttagaaggtactctttctaacgtgtagttatctgacataggaaactacctttaggggaaaattattgaggggtaaaacatgaaaaatctcttctaaaaatgattaacttattaatcttgaaaatgtatacaaatgggacagcaaggttttaaaaataattcactatttttgcttgggaaaataaaagaaataaaagaaataaaatcagcattattttctttttgttagctatgatgttcagcatgatttacatgatttaaaatttgcaaaggagacaactgttggtctgcattgacttattaaaagtatttccttaagaaccaactcaggaaatcttaattagcattcaggggagtttcaacaaattttaagtttctgttgaataaatttcttccttataattctaactaattttaatattttgattttcttctgtgtgtaataatctagcaactgattactgtttagaataagcaatctgttcaatctttgtgaggaatatttacttctgtaatgataggattgttacagtcatattttttgctttatttttatttagttctgtttgcaatgcattttttcaaacattcatttgttcgttcctgttttattcatttactaagcatttacagaatgcttactgtaaaattggcattgtttttaatacttaggaaaacaatttccagcatatgttgaatgctttatatgtactactaagtgcattagttaattatcttttttaatccccacaatcatatactgggaaatagcctatttattaatgtgggccttgggtaaaaagagatgaatacattgtaatcacttttcttggtaagttcacagtctaatggagttggacccagaaaaataattaattaaaattttatgggataagtgttgtacaaaagcttgtgttcatacttggaccttcataagaaggactatctaattgtgcctgaaggagttagaaaaggtgttacagagggaatgacatttgaggtgagtcttaattgttaaatagaaatttgtccagggaatgaaggcagaaacactgcttatagcaatcatgaaatgatgaaggagcctggtatttggtggtcctggtgagtgagctgcgtggcattaaactcaggtgtttttgtgtatgtgtgtatgtaggtgtgagtgtgggactgtgtgtgtggtctgggcctggaagatgtaagaaggtaggaagggaggataatgaggctggagaggtagattcggactttatagtcaagaccctcactaagaggtttatttatttatatttttaaaagttttattttatttttaattgacacatagtaattatacatatttatggagtagaacgtgatgtttcaatacatgtatacaatatgtaatgatcaacctcaaatatttattatatctttgtggtgagaatattcaaaatcccatattctagctactttgaagtatgtaatgtattatttattgttaactacagtcaccctactgtgcaatagaactggaattcattcctcctatctaactgtaactttatactggctgaccaccctctccacatccacctgtagcctcctgcctttcccagccgctggtaaccactattctattctcaacttacatgagatcaacttttttagatttcacatatacgtgaggtcatggggtaattatttttctatgtttggcttattttacttatggtgccctccagttcatccatattgttgcaagtgacagaactgtcttgttttttaaggctgaatagtattccattgtgtatggacaccaaatttttcaatctgttcatatgttgatagacacttaggttgattctctttcttggctattgtgaataatgcttctaacaaacttggagtgcagatgtctctttgacattctgatttcattttctttggatagatacctagaagtaggattaaaggatcatatggtagttctatttttaaatttttcagaaacctccatactgtcgtctatgatagcttaactacttttcatatccactaacagtgtgtaagagttcccctttcttcacatccttgccagcatttgttatcttttgtctttttaatgatggcctttctaactggagtgagatgatgtctccttttagtttttatatgcatttccctgatgattattgatggtgagcatgttttcatgcacttgttggccacttgtatgtcttcttttgggaaatgcttcttcagatcttttgcccattttatagttggattattttattattattattttttacttttttttgctttggagctgcttgagttccttatattttctggatattaaccccttgttagatgcatagctggcaaatattttttttcccattttgccagtttgtctgttcattctgttgattgtttccctttgctgtgcagaagcttttgtgtttcatttaatccaatttgtctgtttttattttcgttgcctgtgattttgaggtcttatccaaaaaaaccttgcccagctaatgttatgttatgaagtgtttgttttcttctagtagtttcatagttttggatcttacatttatttcattgtggccagaaatgttatttgatacaatttcaatttttaaaattttgttaagacttgttttgtagtctaacatgtggtctatcctggaaaatgttccatatgctattgagaagaatgtatattctacagatgttggaatgttccataaatgtcctttaggttcatttggttagaatgcagtttaactctgatgtatctttgttgattttctgcttggatggatctgtccatcactgaaagtggggtattaaagtcttctaccgttaatgttattgcagtctatctttttctttaggtctattaacatttactttatatatttaggtgctctgatgttgggtgcatacatatttacaattttatttcctcttcctatatagacccctttatcattatacaatatatttttgttgcttttcacagtttttgacttaaagtctattttatctgcaatgaatgttgccacctctgttctttttggtttccatttgcatggaaagtctttttccatttcttcacttttaggctatgtatttacttacaggtaaagtgagtttcttgtaggcagcatgtatttaaatttattcagccactctatgttttctaattgcagaatttaatccatttatgttcaaggtaattgttgataggtaagggtgtactcctgccattttgttatttttttttccagttgttttgtagatcttttctttctttttctcttactttccttttttgtgattaggtggttttctctaatagtgtgttttgattccttgtttcttatttgtattttgttttttataggtttttactttgtggttaccgtgaggcttgcataaagcatcttacagttataacacattattttaaactgataacaacttaccttaaaaagaaaagaatcacacaaaaaaccccagtatactttaactccattccctccaatattttgaagtgttgatgtcacaatttacatctttttatgttgcctataccataattaattaatataattatttttaatagtttttcttttagtcttcatattaaagatacaagtggtttacacaccatgattacagtattagagtaaatattaaattaagtctagtttgtctgcaaagttacttttatcagtgagttttataccttcagatagtttcacacagtagcatctttttgcacattagcatcttttcacacattagcatccttttctttcagtttgagggactccctttagcatttttttttttaagaacaggtctgatagcaattaattgttcatcttggaaggtctttatctctccttcatttctgatggaaagctttggtggatacagtatttttggcagcttttctaactctagcactatgaatatatcatcccactccctttgggcctacaaggttcctcttgaggagtctgctgccagatgtattggaattcccttatatgttatttgctccttttctcttactgctttcaggatcttctctttgttttcaacctttcagagtctgatataacactaccccaagacctttcagagtcttggggtagtgttatttggtttgaatctgattggtgacctttaaaactttcctgtacctgaatattcactaaaaagttttaaatttgaggatcaatttgaatgaaaacatgagccatgcctctatataaatgaatatttagaaaatattttagaagtcatgagattaacaactttagaagaggtaagttgaaccaactgctgaatatatctgtctgatatattcttttggagtttattgtctcactttaaaaattaccaattagaaatattgtctttataaaaactagtagcaatggtaagtttattagaattaaactgtagaactgaaaagaaacatatcactgttttaaattttttaaacaacaaatatactgagtttcctgaatattatgcaactgcatgctatctagtcttgactactgagctactaatcactttgtagcttagaaatgaataaatgagtaaaccttcatttattaccttttgttttcttgagacaaagtctccctctgtcacccaggctggagtacagtggcgcaatctcagctcattgcaacctctgcttcccaggctcaagcgattctcatgccttagcctccctagtagctgggattacaagtatgcaccaccacgcccagctaactttttgtatttttagtagggaaagggtttcactatgttggccaggctggtctcgaactcctggcctcaagtgatccgcccacctcagcctcccaaagtgttgggattacaggcgtgagccaccatgcccggcgtattacctttctttctataatttgactcacagtcagttggtactgattctgccactaacctggtgggcagaaacagtgagcaatatctgacttaatattttaatgaggaacaaaaatagagtggattaactaaacagagaggaataaataaggtaatttggtctaatcctttcatccttctattaagaaatgtttctttgtattaaaacacatattcaactttattattatccatacctgtatcatttttgcagaatcacagtaaaaggccaagatgtggcagaaagagtgaattatagctcaggctgatggcataattgagactgtcagtctctcaggtaccacagaggaagtagagagtattgactactaggcagtgagagttaacatcagaataatctttctgcagtggtctcttgtgtccagagaattgggaggcgggaaggggactggacagagtttggctactggaagggcctggtaagtagcattagttaagcatagtaggagttcaaatgcacaagcgaagagggtactatcatgagattaagaaaacaggaagcttcaagattccagggagttcaatcaaaacatacaaaggttgggatgaattagagtggcttgtgatgactctctgggcactgggggcaatgagatcaccaagtgttctctaagaaaatcagtcatctgtggcatgatttcagcaagttctcaaggctagcacaacactgttcattgagtaagaggtaaactattactacgttttgaaattttaaagttgtagcacaagattttacatagaaaacatcaggctcttgttatttacattattcagatctgtaagaatagttccgtgtccaagaacttgcttccttgcttcctccacacaaatttgtataggtctacttctttctaggtatttttttaaagaaaaaattgttttcagaatgatttttatactgtttcatttaaaaagtattcaaaattatactttttatacttgctctaacaatgactccatacactggcatcattatcgttaatattttatatattaattttaattttactcattggaggtttgaagtctaatttaaaaattaaaatgttagaattgtaatttaaagcaacatttgtaaatgaaggttcaaactagccgaatgctgtaagatgttaagggatacttttcttattgcactggaattgaaaactaaaactaagggcaaagaggtatcagatgccccatattgtaaagggagcttccagtggtcaaagactcactccatttagtttaaatgcctcccgattaggccttgctttttcctgctattacccactcccatgattatggttgaagggtaggtaccctagaaagcagactccgagataaaggtaaagattagcatgcaggatattactcagggaacatttttaggataaaaacctgtgaaagaatggaaaaggaggcaaaactgagtagtgggagaagttgaactctgttgtagtctcaacaaagccctcaggtgaacctttaggaagctgagatggcccttcaaagttgtcttgagttggggcaaggcctgggcctttatatccccataagtatcagcactgggcagaggaccaagactcatatccccaagatattggatatgagccacccagggaaggggcatgatctagagtgaggcagctgttttctgctgaggtaattcttgaaggggctgccagctaaggactatctgctgtcatttgaattggtgttcctttataggaaatgttctgtttctctctggctgctttcaagcttttttttctttgtgtttagttttcagaagtttaattatagcatggattttttaaaaaatttatcttatttgtcttatcttatttggggttcacttcatgaatctgttggtctatctctttcacaaaatttgtgacattgtcagctattgtgtctttcagtactccttcagggcctactctctttctcaacttctgggatcttttggttttgtcccatgggtttctgaggctctgttcattttaggagactctgggtcctatttaaatcccttattttagtaggtagtaactctgttaggtttacatcgtaggtcctagcctactttagtgggcagtagttctaaggacaatttaattttccaagattttttggtcttattttggtgggccttgtgtatctggtgctggtggggctcccaggggtctatactgtgatgcctgaggggacagaacacatttttctaggctaggcttctttatgtttctaggtggggaaaagaaagtctctggtctgactggatgaagagtgcttccaggcctagctacttattgtggtggagattcccctccacacctccctcaccagcatctcccacccacaagtatcctggtgaaggaggggattctcaggcctggtggaaaagaaatgacttctgaggccagaagcttgttgagacaggatgcctcctgtctgtgggagatggaaagcccttcctgggctgggtgcttgtggtaagattccccagtgcctgtgctccccagccatcagtgtcccttggtgttggagaggaaagtcaggtccgtagatcatcctggcaggtgcttgttgaggcctgatgccccgtgctggtgctgtcctgtgtcttctggtaggagaggggagtctcagaccctgttgagaaggagaacatttttcctgctggttcatcagcttatcttcagtggggctcctcttcaatcccagggaggactgagcctacttgggctgccttctgttgctacattggatgtcagggaatgctggccctgggtcaccttcttccttttggtgggaggttgtaagatgccctgcaactatgctgttcctccagacctgggttctctaatcagttcaccctccttttgcacctttcagagttctcctttggttgcctctcgcattatctccagcgtttacagttgtatttagcaggagtgggtgggaggaggaaccagaaaaaacaaattatgctatcttcaccagacttcagcttcatctgagagggcagaattttgcaaaatagaatatcgtaatctctcatcaacttgtaaaaaattttaaaaaaaatcttcaacatcatgattctgatgtttaaatattatgtattataaaaataacaacatatactttatagatttatttactatagttatatctttttttaaataagatacaaggtcttgctttatcacccaggatggagttcaatggcgcaatcatagctcactgtaacctcaaactcctgggctcaagcaatattcttgtctcattctcctgagtagctaggactaataagtgcatgccaccatgcccagcaatgtatttgtttatttatttattgtagagacagagtctctctatgttgcacagactggaactcctgggctcaagcaatcctcctgcctcagcctccaaaagtgctgggattacgccaccacacctggcctatagttatataatttaatgtgactattttacttacctgtttatttccagcaatcgttccagaacagccacaaacagtgactacctgaaaaatggttgttaaataattaaattataatttgtattctttataattggcatagaggtttcagtaatttgcccaaaattatataactattgatgaaactaaggattaatattaaatacttcttttggtagacaccacatctattgcatctggaataccatatgcaaattctcttattacctattgctgcatctgttttatttctggtctttagaagtctcagagtgacattagaattacaactagttttagtaagtattatttagttatcctgagagatttgttaaataataataatttttaaaagcctctgtagtcagtaatcagcttctcaccaatgataatacttctgtctgagattaatatcagtgcttttcaatgcagcagactaaaactaatctctattatagaatccacagctggcctgatggaactgtaatacaaaagtaattggtattttttgatgtccagaggatgcaaattataatttgtctcctgtgtacagaaaaaaagtgtgtcttgtatggtaaataattaaacttgatactcataaagttatatttttccatgtcttaaaggagatgactattttatacttacagtcgatataaatataataatgtatttatttcatccttgaacaatgtaactaacattttactatatattaatagaagccaactacaatttgaaattaaataattagacttatttaggaaagaaaaattatggttttttatttgctacttcaggttatgatgaagattctctatttgattgtcctaaagtcaagaatgaggagtgctaacgatagaaaacttaggacaaatgaaaacatatattttactttcattttgtgtattttgcaataagcatataaaatcttaggttagccagtttgcatttatttgatgaaagccaaactttaatgtagtatttattattgttttcataaatctaaatttagctcaagtctttcagcattgataattaagaaatatatgccctctttaatagcgatgtatgtttaattgttcatattacctgaagtcatactgagaattttcatctttttaaatgtcaaaatttggctaaggttatcaggatattaaatgtaatatttcaaaggagtatgatctcttatagataattccagattttgtgagatcaaaattgctgattataataatgttagtaaataatatgggaaaggtatggcgaaatatttaaatttttacaattttaagttgtatgatgtatgtaaatgctattttttctggtaactttggtttaaaaaccagtaatactgcctttgacattggtgttaactggatacattgctttttgtgggcattggatatccatctattttgaaataatttgggagaaataaaataattccttaagatatagtctagcatactaaaaagaacatttgtttgatgttgggtgaaaggactcaagcattggattgaatagttacttaccagcccatgaccttgggcaaataacttaacctcactatagcctcagtttcatcatttgttataggaaaagtaaaattcccaatttgcaagattatttggaggattaagatatcataaagatcaaatcttaaacattgcctgatacataatagatgcttagaaaattgtcttcaggatctatttgtatattccattatttggttgttattttgggcatattttctaccttgataagcttactaaagtatgtatcagctggtccactggcttggtgattcagagcataactttctaatggaaatgaatcatacaagagctcattttatgatttttataagctggtcacgtcatgagttagatttgtgcaagaagttagttcgaacttcttgatgatccaagcattgcgttagggtgaatgcagagccaggtcagcttctgcatgagccagcatactttagatgtgtaacaagactttaacaaactggaagaagaatattgctttaaaatgatgtgtccagattggaaaaagaagaaatggaaacatatgttccattgaattttcattaatttattgtaagtagaattggcactactagagaaagtcttcatatactacagtagtttaaaaaagagaaatacagaaacagggattatataatttccactttattccttactctatattccttactatattacttacactttattcctttctctataagctggccacgtcatgagttagatttgtgcaagaagttagttcaaatttcttgatgatccaagcattgcattagggtgaatgcagagccaggtcagcttctgcatgagccagcatactttagatgtgtaacaagactttaacaaactggaagaagaatattgctttaaaatgatgtgtgtagattggaaaaagaagaaaaggaaacatacgttccattgaattttcattaatttattgtaagtagaactggcactactagagaaagtcttcatatgctacagtagtttaaaaaagagaaatacagaaacagggattatataatttccacttcattccttactctgacttttttgtgggttggagggtatggaacttggcttctcttatgggaggtgcttaagagtgtgaactttctagtaacattacatggcttcaaatactggtgccagcctttggtctcgaacatgttacttaacctctccgtgttccaattttttaacatataaagtggaaatagaaaatggtacctacttcattagcttctttgggggactgaattagctagtaatacgcctggcatctaacaaaaatgataaatgtaagctatgttattttttagttaggattcggggtataaatgtaaatttgagtaattatctggtgattacttttagccattgcattccatttctctttagccttccattacacttgtacaaaagcagtgggtgcctagtacaatgtttggcatacatgaagcgtcttaatggttggttttagatgaatggaagcagaaagcttagaattatcatggggacatgatatttagccttgaaattcttattgagctgaagtattcttacctatctttgtgggttttttgatagattttccatatctttctagtaagttaatatcttctcaagttttttatttttatttttatttttttttgagacggagtttcgctcctgttgcccaggctggagtgcaatggggcgatcttggctcaccgcaacctccacctcccaggttcaagcgattctcctgcctcagcctccctagtagctgggattacaggcatgtgccgccacgcctggcttattttgtatttttagtagagacagggtttctccatgttggtcacactggtctcgaactcccgacctcaggtgatccacccgccttggcctcccaaagtgctgagattacaggtgggagccaccatgcccagcctatcttctcaagtttttaaaccttaagcttctaaagtatactttaaattttcaagaaatttaattagaaagtagtggaaaatttcttactctaatcttttctagccaagtttttcctttgcatttaagttcaagacctgtcatgctttgtgtctaacaaacatgaaaagaaagtggttaaagagacttacctttagttgagatagttttactatttttacattaaaagaagaccattaaaaagtttatatatttgatatctgtcagaaattgaaactaaatatcttttcatgtataggtgaaaatgtttcattgatgtagtttacatttacatcagaagcaccccattgaactgaaatctcatctaacataccaaaacatttgattcagattatttacaaacatagaataatactgatgatttaggtgttctccaagctatacttatgcatgctaaatttcagctaattttgacttattttaataaacatattttaatatgcattttaaaatagttattaaactcttaaattttaaaagtacatatgtccttttacccataatactttggagaatttttttttaatttttaatttttgtgggtacatagtagatgtgtgtgtatatatatagaagtacatgagattatttgatacaggcatgcagtgtgtaataatcccatcagggtaaatggggtatccatcacctcaaacatttagcctttgtgttacaaacaatctaattatactcttttagttatttttaaatatacaactaaattattatttactatagtcaccctgttgtgctatcaaatattagttcttactcattctttctattgtttttacccattaactatccccacttcctctccacccctcgaataccctttccagtgtctggtaaccacccttcttttctccatgtccatgagttcaattattttaatttttagctcccacaaataagtgagaacatgcaaaatttgtctttctgtgcctggcttatttcccttaacataatgatctccagttccatccttgttgttgcaaataacagattctcattctttattctgacggaatactactccattgtgtagctgtaccatgttttctttatccattcatctgttgatggatgcttaggttgcttccaaatcttggctattgtgaatagtgctgcaacaaatacaaaagtgcagatatctctttgaaatactgattttctttctttggggtatacctaggggtgtgattgctatcttttgggtataatgtaggagtggggttgctggatcatatggtagctctgtttttgtttttttttgtgaaatctctaaactgttttccctagtggttgtacaatttacattcccaccaacagtatataaggatcccctttttaaagaacttattttatagaagccccagtatgtggatacacacacacatacacagacacacacacacaaacacacaaatttttactagaacattatctctaacagcaaaactggaaacaatgtaagtgcccatcagtaatgggagtagttttactcaaactttggaatctcatagggcgttacatattatttcattagttagagtcatggtatattgataaaagagaaatttatgttgcgtggcaaatttatttttgtcataacctcagaagccttaactatttgcatatatttataagaacatggaggccaggcgtggtggctcacgcctgtaatcccagcactttgggaggctgaggcgggcgaatcacgaggtcgggaaatcaggatcatcctggctaacacggtgaaaccccgtctctactaaaaatacaaaaaattagccgggcgtggtggcaggcacctgtagtcccagctacttgggaggctgaggcaggagaatgacgtgaacccaggaggcggagcttgcagtgagccgagatcgtgccacttgcactccagcctgggcaacagagcaagactccgtctcaaaaaaaaaaaaaaaaaaaaaagaccatggagaaaagtatggaagggaatggtagataagaggagttgagtttgtttaatatacttgattctttaacatgttcaaatgagtatgtattattttatattttatataaatataatttattatacttacatgttttatgttttttcattaacaaagtaaacactctgctatattgatcattcttcaaatggaaacagaagaacaggggccatccttatgaccatctgcactaagagagttagcctctgaaggaatgtgagatttaggctagccatcatcagtgaccagtctgtttaaaacatacctgttcaatcaggtcccagcgggaaacagatgatgcagtcaaattacgataattcaagagctggagccaggtgtagtgtaggagaaactcaaggagtttttcatggaccaggggccaccaacagcacagctgttgccacttgaggcacaaagagacaaggagagggggaggatgtcagaacccagaaaaagtcatgttgtaaagaaccttgattagaatggtgaccttctttcaagggacatagtccattcacggtaagcttacaggaagtgaaccagggaagaaaatgttgaatgcattctaatctctcctgtcatctgccagggctccccactgactgaacccaactagagacagatgttaagagagagccttttgatgtcaagtacctagatcagcagccttgggcagagaacaagggcaagtatagagaatgggttttgaggagtaaacaggagctatctggcataaaatagccaactttttattttattttttttttttgagacagagtttcattcttgtcgcccaggctggagtgcagtggcgtgatctcggcccaccgcaacctccacctcctgggttcaaacaatctcatgcctcagcctcctgagtagctgggattacaggcgtgtgccaccacacaaggctaatttttgtatttttagtagagacggggtttcaccatgttagccagggtggtctcaaactcctggcctcaggtgatctgcccaccttggcctcccaaagtgctgggattataggtatgagacaccatgcccagccccaatattctttttgaattaaataatcaaaataacccagaagaggaaaacatagataatatgcaaaatattgatatccatttactttatgggcttacataattattttttaattgacctaagcccaaacacaaaattaaaaaagaaaatctgaagatggcattgttcctcaccctcttctgtacataagtcctaagttcttccttaaactcccatgagggcatagcagtgaacatctcagagtggggacagaaaactattcctaaagatgaacatggccccagacccacaaaacgccagactttggacttggtctgaaatagtggaggttttctgttaagtcctagcttgtttccaaggaatgacactgtaaatcaggtcatggaatgggaagctgacatttactgacccttggcatgtgccaggctccatgacatacattcatgtaagttatcacttttactcctctcagcaaacctgtactgtgaccaatatggtcacatgaatgtatgccatggagcctggcacatgtcaggtttgctgagaggagtaaaagtgattactctttaagaaacagaaactccaagagtttaatttggagtttaaggaactttctcaaggtcaatgatagagtctggaattggagctaggtctgcttggctacatcgtggcacagcctcacttggctgcaagatggtaaaggagtcattatctattatcagaggtctctcacctgtcccagaaatatggctttccccttcccctctctctcattcccttatcttccattcattcccttagttatatatttaacaagtatttattcagtacctactgtgtcaggaatcatgcattgtaccattgatatcaatgaatatggcctctgccttcatggattttacagcttaataagaattctcaggggattcatcgtatggatttccactagccccaagtccttttcatttgaggtcatttgcatctcagtcttcctatatctttattaagactgagaattattttttggcctatttgtttaaataaaagtgtaatataaaaattgtaataaacctttttaaaaatctcacttgctagttcattattttagagaattgaggatactataatattataagaaatatgaaatactggaactaggtaagataatatttttaaaggtgctttctggttttattgaaacaaatcagccagctcccccaaaaatgtggatatatgggtacatgttgaggcttatgttttaatcaggctaaaagcgtatcacattctctcaaataagcatatctttcatttcttaaattgaaaatttatttgtatttattcaaaacctttcttgtcaaagacaagttaaaactgctgttcaagtgtcttgtataattataaccataaaactaataaacatttcaactaattttttccctattcagatatgcttgttcactcttgggaaagccccagattgggttactgaagtaatctcatttttgtaactgagccagtattatcattatcaaaattacaattgatctacagtatagtgtcataaagggtgactggtatgtagcacattctgatttctctcattttgcattagatgcattgcataatagaactgtaggaattgcctgctaatgctttagttcaccctttaacaattaagttaggcaatcttgggtaaagcaacattcagtaggctccatgcatgttgttttctataaccacctttggatgcaattttggggagtgggagggctgcaatacacacacagagacacatacatatatttataatttgttaagaggaagttactattaaacatctaagttgacatattgtatggtgggttcttctgggtctgatcctagacaagtgagttaacaacatctttgatcctctttagctttctacttttgtaaaataaaggggttggaccaaataagtggggtttttgtttgtttgtttatttgtttagcttttagagttttttttgcccatgctacgatattcctagaagtcactgagtacctagtaaggcaaaccaggaccagctgtagctcctcccttgtactttaacaacagtaattctgttttgttttatatgtgaatcatcccaagtaagacttccaatctctgatgccttttcacctatttattagtagtaggggtcattgtattctatttttggcttcatagtgaatgacagcttgtacaaacaacacagatactggaataatcagtcttttcttcaaattctgtagtagcatgaactgtaaagtattaatcatgtgtttatgcctggtttctacatgtgaatccgttaagcctattcttaattttctcgcttcgtcagcttcaaagcaggaaattacaccattgcccaaaatctccaccattctgttgattttgtttgggaggtgtaaatctagtaaagcatagacagaggcctgttgccagattgatagctgtatttgtctgcgtagattgtattttcacagctgtcaggtgagatggttgcttcctatataaagtggttctagaatcatgcatgtgcttgggattttaatttatcagattttttagcacttcctacttaaagagcttcaaactctagggaatataatgtatgccattctgaaaggtggtatttcagcttttgtatctttggggataacatgttgtgaatgaaattggtgttttaaatagagctcctggggaagtttttgccaacagtccttttgatatcccatgtgctctattgtaataagaaagcagaataaataaactaaactaggtggtcaggattctgttaggatgaaaacaagtataatttcctttataatgatgaaaagcaaacaaaactctgtacgaatagttttaatcaatgtttaaagactggtttcccagactcttgtgtgtttgacagatagtcttgggtggggtagaaatggagtggaaaaacaaacaattactgtggagataataaaaattactgggcaaaaagaaaaaaaatatttgaaatacttcttttttttttttttttaaaagacagagtcttgctctgttgtccaggctggagtgcagtggcacaatctcggctcactgccacctctgcctcccaggttcaagtgactctcctgcctcagcctcccggctcatggttgacataagttacctctcccagcatttttcatttgtattttgagaaaaacataaattaatgtgttattgaaaactgccgtgatcatttttcatttaggctaattattccaggaaagggattcctatattgtattcactttttttggttttaatactttaatagtgagtatttatagctatagaaatttgatacttttaattaaaaaatttgaaactaggttcaaatgaaagaaaaaattcttataaactttaaaaatgtaaccacttgtttagggtattggaaatcaattctccatatttgacactatcaaattagcttcagataacccttttcttcattttgtgttcatgttgttttcactttgtaaacagtaaaactccatctccttgcgtgaagttattttagggggaagaaaaagtgcaatacacagattcattatcttgtaatgactcattttagttttgcattgaatcaatctttgagacaattactgtaacttgattttttccttccctccactggtaataaaagagacattttatttcagggaaatgtgaagtaaaatagtcttgcttcataagcatgctcagagaagagatttttaaatcttgttttaaaaatagtggcatcatgttcatgaacttcaagttttctttgttccttttcttcttttcctttttctgtgaaactcaaggattaataggaagcatgtccaaaattccctctaggaagaaatttagatagggacataaatatattttaggcattcttactaagcatttccaaataagctttaagagtttcttaagtaatctttgattttataggaagaaaaagggtcaaagtttgctttcttcacaaacttcagtaaacaaatccctcttgtattaatgaagaaattgactaaacctaccaattatctcactattataaaacatgtcttgaaaatttattagatgcaggccaaaccattgaactcagaccttgcctttaagaagcttccatctaattaggatatatctcaatctattggagataatgaagtagaaactaaattattattaattttagacacacaaaagtcatttcacttctgtaaaatggaagaagtaacgtgaagctacctgactaatgaatgttggataaccagttattggagtgctttgtggaggtaaagtaataactacaaataacaataaagtttcacctttacttgcgtatttttatgtcacttttgctgaagaaaagtgccttgacatttttactagtaaagttaacttttttgttattttttagagaatagaaatggataaaatagacaaatttgatggattctttggaaaaatcattattggatttatagttatcggaacgtttttgaatatgatcaaacagtttaaattaagattctattacatggatagtaatacacatggaattaccttaaaagtgattgtgtactatgtagaatatcacaattttgtaaaatagttctatagcgaagttaaaatattactggatatgcttatgtaaaatacatgaacacacagttgacataaactaacttgatgattggccagaactggaattccaattcttacacctacccatccacccacatctattggacaagtgcctggttaaacagatgggccttgggctgtgctctcaaaacaggcaacctccacctttattgagcaaaacattggatgaaaatagactatattgtcttattgtgctactgaacatggtaatttaagtgaagagctcctatttattattgttgttggttgttaaaaatacctttttccttatgaatgaatatgtgaaaattggaggacaacagatggagtcccagggaactggaaaacctatagatagggaggtaattctcagtcaaatatgaaaataaaaaatcagcaggagtgtgaaatttcatgtggttttataaatgcatgtagctaagattttagaaaatgtttggtttagcctacagacatgggttcatcatgaaatttctcttttccactaaagggtatgagaccaagtagaattctcgaagtctgtcctcatgccccttcaataagttaccacttcaaaagctacaaagctggattcagggcaggaccttaagttctggctaccgtctgtgtaaatatcacacacttacatgtggtaaagtcagagggacttgcagacctgagtgatacttatgacatcagaagtgagttttgtttatggttgattaatgacattgctacttgggccatgtttgtgacaacagcactgagggcaattagcaagagcaacagttagacagtcccatacttggaagattatatgagactaaatttgacactcttaatattgacatctcgtaaatagcatttggtctctatgtattttcatgatattctctttaatgtaacaacaatcagtaaactgtcacatatctaacctcatggaactcacatatctaacctcattgaatcattaacaatgatatttgcacctcttaaattatgaaatgggtggtctgtgggcagcatgctaaaattcaagtaaaagacttcctactcctttttcctaaattatttttttagtcttttggtaactcagttttcacaaagaaggggagtttggttgctacctactttccctgtaatactgcttggctatttttcagtggcaagaaataattcctgtgatacttaagaactctatggaataaagctcagtatagtgtatattgaattatgctttctggttattatatttggataaatttaggcataaggttgtttaatacttcagcagaaacctgcaatggaacttcctaaaaatttgaccttgtgaaagaaatccaaatggaattgttttatatttttttagctcctataaatgtgtgtgcggggttaataaataaataggtaagaaatagcacagcattgtttaacgtttatttctttcctcaaaataaaaagttaatagaaaaagtaatacattgttattatttaagagttatttcttactgcaaaatgttttgtgatagctttgtttcattgtgtttaacttaatttaaattactataatacttttttgttacatcgtcctttgaaatcattgaaattgactaaataatattgttctattctacttgataaaatggagagctcagaagattaatttagatacagaattgagaataaaacagtctcaatttgtgcttaattttattagaaggaaatatattataaaaatagccatttgaagagaaaaaagataaaagtagtgaaatattttaattttcaaactctcataaaatagtaatacaggctgtctttaaatgaaagtaaatattttgtgtttatgtatgtatatgagacatatgatcattattagctttatcttgaattactctgatatactatatttcttatacatattatttaatgtcttttgttgtgttttgttttaaacagcaaatgccagtcttcttggaggaggaggtggtaagtcctgaacatcacttaacttaaaatacattttaattgttataccaactacaagatatttagtaagttctgtgacacttaaaagaaaattaattttgctgtagtcatcaattacaaaaatgttaatctttcaaaaataatttataatataaataccttggtttgcttaaatgttattttaattgacttcgagatatatacagtactcttgtcaaactttgtatttctgcttttggcataaggtgtaacagctataagctatatgaacacacatgtaatacatgtgtgtgcatagttacagagtaactatgtacatattacagagttacttttaatatgaattctaaaacaacagaacatttggaggctatggtttctttttccactataatgactttcttttgcttttcatgactttgtagcctgagagcttaatatatcagccacttactttgaaaaataaaaaagaaattactgttgacactctgctttttctttctgctcagttagaggagaaagagaaggagatcaaagtgagctgagggagacagagattcctgtactgggaatttttttgatactaaaatcttgtaactatttgtatttttacttctaggttaggaagatgaaagctttcatagtcccagtatatataatatagtaggagagaaaaaagtatacgattagaacagagtccttttcatataaggcccagatggacataactaggtttgtttcctctttccctgtcactctctttctcccttcctttcttgctctttcttttttcttacacacagttgaaacagataggattgtgcagagccttaggctttcatcaggaggtttcattgtaatttttatttggaaattaagcatttaacctttgtttctctgtaagaacagttgatttttaaaaaacagaatcttgaaaataagaaaaatagaaaagtgtttgaactaggaagtgctcttcgtattatcacatgtcagtgcatgttctgtaccagagtatcatgaaatgagtgtgggatttgaaattggacttactgtgtggagaccaggaaagcattactaaatatctccaagcctcagttacctcatctttaaagtatgaggataatattaactatctaaagtgtttattgggagaattaaacaaaaatatttgccaagtaactaagtaatagaacagtgggggattcataaatgtctatttcttttcttctttcctaagttattttagaaaatatgaatttgtaggatgtttcattgcacttgttattttatttggggggaactagaagggaaaattttccttagaagttgaatttccagtaattttttctctctgtctcttgtaataggtgaagaaaacatgattaagttaaattgtccatagtgctgattttcttacaagatatattagtattttaagaaacctcacgaatattgttaatagcatagaggaaagttaaaattgagtctatgtaaacacattcatcaacttaaaacaacaaattaggtagacgattcagttattgcttttgagtatttcaaaaaattgacttgactaattatattagttaaaatcactttagccactataacagaaaaagtaaaaaacattaaaatccacaataacagtagtttaaaggagatataaatgtatttctgtctcatgtaaaggtagtctagatacaggctggaatggttgtgtgatgaatcagagactcagctcttacttttctgttctttcctagtgcatggctttcatacttagatgacctcagggtacaggatggctgctggagctctagccatcacaaatatggcacaggtcaggagaaataggaaaggcaaaacatgaaaaaaagtgggctcccaaacatgagtcagttttctttaagcagatttccctggaatcccacattgtctttgaatctggacagtattcattcctagcatgtagtcttttattccaagaagcaatgcactcatcagaaaaaattaccgttctgttcactaaggaggaaggggagaatggaggttgaggaaaacagtgtaatgtacctgccatggtggttacctctatattgtcaaactgatttctttaaatatatgtatgtattgttggtgtgtatagaactgactccagtgatttggcttgtattttcttatgattcctctcttctctgtgagaagatttatgaatttctagcaatgataagacattcaggaataggccaactcagttttctatttagctaaagtctttattttagtgacttcctctagatggttgattttgctcaatttgtcacgatttataatttttgaataataaaattagcaactcagcatcatcataaagataaattacaagtatttaagatggttgtaatttctttcattaaagtaggtcatcgacaggtttaaatttatttatgcacttctggagatgtcaagattgctctaaaacacgtgtctgatttttggaaagctgcatttaaaaattaaatttaaggaatatttttagccttctctgagctgatttttgaccttatgattctatgacaaatctttttaatcctctcagtgatatttgtaaagtaacagctagtaatcatctaataagaagcgattgaattgatgtaattctcttggatttaatcaaacaattccttttttcaacatgaattaaaatcccttcaaaggtccatcaagagaataattttttaattgactaaacaatttgatcaagaaaatttgacaccacatacaaaaataataatgggacctaagtccccttctttagatcctcaggagggcttcccccatattctatatgagtagtacctgatagtgaaatgtagacaaaattattgtatgcaaaattgtattagccataaaatcttagcattttgttgttcttttctgagtgcttaccaccaataagactgatcccctgaaagacttaaaaaatggtcacatatcatcctctcagtgctgattttaaagtgagagatttactttacattgatgtgaattttcatctttgagctagatatcaatctttctatgaatgtattgccactgactgcagttcattgtagtgagcataggtgatgtgattacttctactcagtcatttcagttaaaatttgataacttttaccaattttaccaatttgcttggtaaaattgatcacttctgttcatagtttctagataggttgaaggcagagacagttatgtactaatttcttaatatatagctggtctatagtgactgaattgtacttttcaggaggcatttatattaatgttaaaaatctttgaagttccgttaatttttttgacaaactttccattattattaccaacagtaccctgtatattattttacctgttgttattttaatggttgagagaaacttcttcaaagttgcatagcttatagggcaaagttggaatgagaagacagcgttcttgactgccactccagggctccttgccctggcactgtggtttttaacatgcctctgctctccaggtttgcttttctatgcagagatgggtaattctgtttacaccaggaaaaataagtgagaggacaggaaaacatacagttaagatacggatgttgcattccttggcttattttcacaagtctcaagatctactgatagcttgaaagtcgatacaatggcactgtcttacagtactcttggattgctgcccagattcatatacttttttgtgcatttgagattcagtcttagaaaacactgcatttcagatacatgttcacccatctgtaataagaatgttgtacatgcacaaggtcctgtgatgctggtacttttggaatatatagtaaaatataaatcattgtagccagtcttaaattacataaagaagtagaattagaaagaaaaatcagaactgaagagctaattcctcacttccttttggatcattatataataggaacaaaatttacggtctcttactttagataatatcttttgtttttcattgacgtaatagttaacacaaaactagaacctgctgatagaacccaagcaggatgttgtttatgggatgtgcttcctcctccagtctgtcaaagcacttgagggataatgctagacatttaaaatgacggttcctgacagagtggtaacttactgtcttttgtacacatagctttatgactgccattttaatcatatatacatacacagagataaaaaataaatatatatatttgcatcaatgctgtaatttgataccttattcctgagttgattctgtggcaggttaatagataagtactgttgtctaataagcaagtgctgttatctatgcagtcagccccagctgcaatgcatgcaaagccatttgtccaacgcgagaacagagaggacactgtgagccttcccacctctgatggcttcctgctctccttctgccccttagagtaggcccaaagatggacaaggttcagtgccttgtgttagtacctgctcctctaatctccctcatttctgatttggacagttctacttgcagagaggattcattatgcttgtctgttattaatgtcccttcatacaatgaggctgtttgtgtgacatactaaaattcatgcttgaaaaggaataaaattataacctgggtgataggtgataggtgcaccaaaatctcagcctttgccattacacaattcatccatgtaaccataaaacacttgtacaccaaaagctattgaaataaaaaaaaagaaaaaaagaagagtgaaatcataaaccatgtgctgttatatcatagatagtatttgtgcatctccacacacccatcatctgtttctaaacacaagcacacatatgtgcatacattcattcagcaaatattaattgagttactattgtttgtcagtattgattattgattgggcagtaaacacagccttttccctgtggccaatcatgatccctgttcagctgaattactagagcaattatagttgtctacattctttcagatgttccaaggattctgctggcatagtcttttgagttaaaatgatgctttaacattaatagaatgggcattggatgtcttctttaaaaggcagagcagatatcctgaaaacaactaatttcacaaaaaatctgagttgctacctggaattcctaatgtgaagagcaatgtgtttaaagggctttttgagtgtgtttaagagggaatgatttcataaattttgtcttaagcattcacaagcagagtggagcgccctctcacctccctccacatacacaacggctttcccagcatatatcactccagcgctcaacatcctgcagtgattctgtttcgctcttgttaaacctccagatgtggctgggcttcaggcatgctgggaggaatctaggatagcagtcagcagggagggactgaggcagtttacagagggtagagtgttgggggttacccctcaggagagtcagtcaagcatggctagtagtgactttgccagctggcctgtgctcagcaggggaggggccccagccatgggcctggggaacagcaacagcctttcagtcctgagagagcagcatggcaggagaaactcaggggctctggcctttttactcaggcagggagcagagatgcaggaaaggatgtgatgctaggccacagaaaatagggtttaaatcttaactgcctcggccaggcacggtggctcatgcctgtaatttcagtacttcgggaggccagggtaggaggattatttgagaccaggagtttgagaccagcttgggcaacatactgacacctcatctctacaaaaaataatcaaaaattagccaggtgaggttgtgcatgcctgtggtcccagctacttggaagactgaggtgggaggatcgcttgagctctggacgttgaggctgcagtgagccgtgatcacaccactgcactccagcctggccatcagagtgagaccctgtctcttaaaaaaaaaatcctgactgccttaggtgggattgatcctgggcactgtgggcggataagcctgctaaaggaggccaggaggcccagatatgaggaagaagagggaaggtggttagggaccaggagccaggccaggtctgacaatgctgagttacacactgagccaacctacctttgccctccctccttccctcctccccgtcttctgtcctccctccctcctgcctcccttccttctttgctttcttccttcctttccctgtttccctccttccttccttcttttctttttgtctttctcagtcaacagcaactattgattacttcttgtatactagccttgaaatcagtgtaggtaagattcttagaactaagtgcagccagaggcataagtacttatttacacattaatattttaagaactaaataggttcttcaagcagggaaaatgaaacagaacaaaggaagtcaacagcttatagtggtcagggaaggcttcccagaagaggtgacatgggagcagtcttgaatgatgagtagtagttttcaggaagcagaaggtcatgatctattcagatgtatttcctactctttgctgtagagatcttgctctgccatctcctcactgttctgccatcatatcatccaggtcttggttaagctgttttctttgacagtcccagcatgccacttaaaatggagtgaaaagtgttagggcagaactgaagagaggaactctggtgctggtgatgtgggtagcaaacctccatcagagcaacctgggcaaagtctggtggtcatcgccagtgcgagctcctccccgctttactttctcttgtgattacctcacctgcttctcagtctagggaccatctctacagctgctcactccagttggatttctagtatgtgttttcttcattccacatgaacttgtctagttctttctcttaaaagtttaacttagccctgattgctctaatcttgcctgctttttgtcattaagccttccagatgctcttcgtggtagaggaaggtgaggtggggagggttcaaaatccaagccatgcatctgccttgaactcttctattgtaatggcaattccaaggacataatttgtttattacacttctaactttggttactgtgatcccttcattctaaaactaaacttcaaagttattcatcatgtttactacacatgctcccacttctaagtgaacctccctgttgaaagggcaaccctatgcagattaaatgctccttctcattgtagccatacctgaacctggaagtgtgtattccccaattaaggcagaaatttcctgagagtgagtaatttcatattcatctttatagccctggcttattctatcacatatagtaggtgctttgagatattactgtctctcatcccggattctcaacatgtttatatagttcggttttgaccagtttactttggaaagttaatctctttatcttcaagtgatttctaaatgaaaaaaaaaaacaaaaacccaaacttcagaaatgcttttaacaggcaacctgaggattatattcatatttatacagtaattatttttatcatagtattatcttttatttttaaaaagtttgtatagccaggatctcataattttctttaaatatatttactttaaatgggcaataaagagaacaatatgtaattgaatagatggggaatgaaatacagagaatttacattctacagatcacatggaaagagggaaagcctattgtttcattcatgttttaccatattgagggtatttaaccagttatatcattctcctttttcatagtttgattttaatttattaataatttgtcttttacatactacaggtaacttgtcattgacatcatattactaatatgtatactagtgttatcctacaatacgtttctatttttttttttagcttcaataatatagaaaaattgtatgtgttggtgttcttaactggatactcttttaaggtcacttgtttccattttacttttgatttttagagtttgcgtttttaaaatgagttttataattggtatgtattatttatatttgtatgtttcataattaactctttttaaaaaaatagaggtttagtcattctttcagaaaatgttgagattagcaaatcatgctcaaagataggaattaaaggttgtaaagaaaaagaaataaaaataatggaagccctcttttcagatgtggaaatacgttggtaaaaattctaggctcttataagttctctcactgtgttgggctagctaaatgatacctaaatggttggaagttcagataatatctataaacaaatattttaaagttaggaagtactctaacaggtgccaggatatgtctacatatcttcctaattacatagtagctatagtataatgcttgtgtagcttatctacttgcgttaaaggtaaaatctttttaaaactataaaaaagagaagtttattgagttcccgatttaaatatctctcatccccaaagaatctctgaatgtgacttgttggtacacagtaggaaacaagtttcaagcaaaatactgcaggtcaagcctgttatgttttgggatgactacattatattccttcagtttatggcacagaattgtttttttaactgtatctgatgtagctccacagtaatacaaggtggggcaatttcttagggagccacttttataatcttttttgtttttggcactgttaagaatcctcttcttcatttacccctcaaactgaagatactgtagggatgaatgaatctggccagttcttgatggcaacaaattcaagatctccagggtcctgtcacaggcactgtgggtccctcgggttacatgatcccttattgctgcagctctctttggtcaaaagtcattatttttttaatgagttaggacaaatttattgttttgtatactagtttcctgttctaaaatgatggttataatggtacctaactactttacaggtgtggaataactaattgcccactgtaaaatgttgttgaactacaaagtgttagataaatgagtatcactctacttgtcattattattaatattatagtgcaaatctgaaagatgaaagttgctggataattgcaagatatggtgatggtgtatccaaataaaggggaataacctgaattgttggataacacaaatccagatatctgtgtgtagtagaagagtttgttttacaaaaagattatatagatagctgtgctttaattaacccctcaaaaatctgaggatttttcctacaaatatggatagaggaatattctaacagtagttcatttcatcggtatgtatagtggtcatcataaggaagcgtctttcaagtatttaattgcccagagtaaaaaataattatatactagagtatgaggaattccagcttcatgcaacattaccagtctaggagaaggtgagcttaatgtagtcttcaggacaggacacgtgatgaggccatctcttaaggtatgtgaaaagaagccagaagcagtagcatttttctattcaggcacatgcttggcactggggaggaacaagggatcccacagaatagagttaatggcccacccatgtgtatgtccagcaggcagtcaggcctggaaaaagaagtagggaaagaaaaacctagcagaagcttagagtacacaagggaagggtggtgctgcaatctggaaggtgacagggaagaccaggtatcctcatggggacacctgaccctgagtttaaatggcagcaggagagacctggcaatagtctggagccctctgaggtcagtatatagaccccaggtctgaaagggtgacccaagtcagattagctaagagaaggttgaggctgctagagaatctgagtctccaaaactggctttgagagtggggctgaatggagcttatgcatggggagaatcagtggattcagctatgaacaactgggagagagatgcaagaagactcagaagtgtacaatattgggacgttctccaggagaagatgaacaagaagtgatgtctgaggagttgtagctaaaatactctctcagcttctgccacatggttatttctgaccaacaaaaagctctcagaaatagccatgaggggcacaaagccctcactaggctaaaaatccactaactctgcaacttcctagatgctgaacacaccaaaggcctcacacttacaaatgtggtatgatgtccatgcctgcagggtcagctttgcagaacagaccaaaaagacttttacaaagctccaggtttcatttctagcatgattggaaaaagcataattttctagtcagattttgttaaacaaggaataattctacatctccattagtacaaaagccttgctctgtcattagattatctctacttaagaatcttctagcaggcctctctgcatgccctggatggttgggcactatccctactgtgtctccatcaaagtcagtgcattttcttaggtaactatctctctttcctctaagattatagatttcacaatgacatggactgtttctattgtgttcacttgctgaaacctcagaatcttgtagaaaatttgacatataataggcacctaccaactagctgttggacagatggctaaagaaataatggtaataactaacgtttatggggtgctgatctgtgccaggcactgtgtaagaattgcacatacattatctatgttaattatctcaatattctgagtagatagatattattattcttctcattttacagatggaagatcaaaagctcagtgaggttaggatgaataaaatattgggcagacccagtatttaagcaaagactctctccaactccaaatcccccttttaatcattgtactgtaagttcacgagttcaaattaacttagtattacttatgggaataaggagtatattcatggatttatatgtctctaaaccttcttattctgattttttctgggcaacagattttcttctttgaatttccaactcatccttatgtctaattctcatcctctggaaatagctttacccctcagagttatttcctgggaatagaagaatcagtggtgctaagctaggaatttctaggcttgtctctccttctttctcagtttgaatatgatacagtatccgttatttaaccttaattctgataaaatagtattttcaataatcagaaattctgaggatcttgttgtatttataaataacagaaataaactataaagaagtcctctttgacttttctcaattccatttttctttcacacagacaatcattattcggtgtacaactttttatttgtcatagttttatatacatatgtatctgcaaataacaggcaatattgtttaaaaatgttgcataaatatattatgggcattctaaaatttgtttttattttattattttgctaagcattgtttaaaaatgtattcatgtagatatagaaaccactaattacaaaatgattactctaaggatactttcagtttaattgagaatggctttatgcctataaaattcagttctgtttttgaaaagtagcttttaggaacatatgtaccagttatacaagaatatatcttcatagtcctggtacagctagtctttctaatgaagatgataaaagttggaaaatttgaagtatgtacagtatatagctttggaaggcagcagcagtactaaatttcaactcccacaagtttagatgtgccagggtagtatatctggataatatttagattggtgctcttaaatctgtctagtgtttctttgcatatatcaaggaatacctgtttttggcctaaaaattttatgccaatctttatacccaaacgccaatggttaattcatcctttaaaaaataatacaagataactttgataaaacacctagaaagttcttatgtttgtctcttttcccttgaacagggagaagaactctattacaagtattatcttaaatatactctgaattagtggttctaaaatttgaatatgcatcagaattgcttggagggcttgttaaaacacagattactgggccttatgcccagaatttctgttttagtaagtctgaggtgaagtccatgaatttgcatttctaacaagttccgttttaatgctgaccctgccaatctggggaccacactttaagaattactgctctaaataaaagtgaataaagagaggattttaggttatggcagagtgaggagattggtaaatcctctctccaaaaaaagcagctataaggctggacacaaaatctccaacaaaataaaatcataaccattttagtactcttaacatctaaatagaatataacaatttgagaaggatttacgcttcaaaaactgctgaacttcatagttggaatctatggcaaccttgctcccaccctctccatttggttgtgtggaaaatctgcaagggttgggagtgttggggggtgggcaggttgtgcctctgtagtcaaacaagactcatagactttgagtggtgagtgattaatacgccctgaagagttgtcagtgaaagtgatgatcttggccagatgagggccaaaagcctgaagttatggttgtggttgggaccaatatatttctggctaccactgagcacatgcacagtggagaccaaagagaccctaagctttttatgtactcttgtccaaacctgaggctgtacacatttgcataggagccacaaaaggccaagaagaatataaaagccagagaagacttgtaaatggccttaaccgtggaatgcacttccctacccatataaagatctgtgaacagagaatggaagtctatctggctctagatatttgtgcaaaaggactatccagtcattggctgaaaacttacaatgaatcaggagtaacccttgggaagccagaattaaaaataaaaagcaagaataaaaaaaaatccaggcaaagatgtcagagactgctgatcatgaaggagacgtattttacagatttaagcctgggtaagttaccaaacaactccaaaaccttccagcaccgataactttcagataaaaaataatcatgttctggccaggcctggtgggtcacgcctgtaatcccagcattttgggaggctgaggtggacagacaacgaggtcaggaaagcaaaactgttttggctaacacagtgaaaccctgcctccactaaaaaatacaaaaaattagccggacgtggtggcacgtgcctgcagtcccagctactcgtgaggctgaggcaggagaatcacttgaacccaggaggcggaggttgcagtgagctgagatcacgccacggcactccagcctgggtgacagagcgagactctgtctcaaaaaagaaattaataataataatcgtgttccagagttgcgatactatatcattcaaaacacttttaaaaaatgggacattcaaataaacaggaatctgtgactagtattcagagagaaaaaaacagtcaaaaagtagaatggtgattactgtagaccagtgggggtgaagaaggaatagggagttattatttaatgggtacagggtttcagtttgggaagatggaaaaagttctggagatgcagggtagtgatggttacagttgagttttggccattatttcttcaaatatttattctctttcctctctttctggggctcctgttacatatatgttgtaaaaaaatatgcaaataaacaggtacttgtgactaaaactcagaaagtaaaaacagctgaaaagtagaatggtgatcaccagagaccagtggggcgaagaaggaataaggagttattgtgtaacgaatacaaggtttctgtttgggaagaagaagaatttctggagatgcagaattgtgtgaatgtctttaatgttactgacctgtactattaaaaatggcccaaatggccaagttaatgttatttatatatatatacatatttaccacaataaaaaatgtagacaatagaaactatgactgagtgtctccagatgttggatttagcaaaaatttcagagaattatattatattgccattttaaatatagttaagaaactaaaggatacatatatttaaagaattaaaggaaagtgccacaacaatgaatcaatagattctccactccccactatgttgatggccataaggatggtggcccatgtccgtgatacagtttgctgatgctgcagggaacaacatggaccttgtttttctatgattgagtgcgctggcctgtttgttgtctccctgagaaatcagctcaggggcttgcctttgttttacttaactcagaaatttctgagggctggagtggcctcctgaaagtatttaaaggcaaatatactagctacagcctcctgagataagggatgtgaaatcatgcaaacattagacatacagaaaagcctgggaaagaagaggcatggagggagagaagtgatttgaaaggctttcacatgtgccaggaaatctacaaagccacagataagcccagggctggattcatcttcagaaaagactcaagaaacaagagtttcacctctggttcaccgttaggatcagtgaaaacaggaagtgaaggctaaggaagagttataaatagcctgaataagtattgaagaaatgcctcaacatacagtcagtctgcaaagatgggagattttcttttctctttttttctcttttcctcttctcttctcttctcttttcctttctgctccttttcttttctttcggctctaggcatttaaggaaatacctgtcaaattgttatttgaccactaagctaacagagcagagacctcagtgaccacacttaacaaagaacacagtcttcatgcaaacggtttagaaaaatcactgaacaatcaaaacccatgacagcggccaacaataaacccaagggagggagagagagcagaatctgattttcagagatttgacattagaatattaaaagttcacttttcatcagaaaattacaaggcaagcacctccatgttccaggcaccgttctaggtagtagcaatatacctatgaacaacgtggacaaaaatccttgctcttgtgaagttggcattttattaaataaatatatttattcactaaggccttaatttttcagcatcttattatggtaattttcaaacacatagaaaattaaaacaattacacagtgaattgttcatatgtttaccacccagattctacctttgacattttactatatttgtcctatcttgtatctatccatgtagccacctatttatccatctaccaatccatcctttttgcttatagcattatatttaagaccacacaatgaaaacaacctaaatgttcaatagtaggggatttgttaaataaatttatgtatttgcactcaatggaatcatatgcaaccattaaaacttataattttcagactgaggaaaatctgtatctagttttaggagaaagcaggatattaaactactgtgcatttttattttaacactatgtaacaaactatacaaatcaaaagaaccataagctattgtagaaaaaggaaggatactttatctgttaggctagagggttttttgtaaccatttttttctttccccttttttgattttcattaatgttgttactgcattatttattccatacatacatttacaattttttaattgggacagtaaaatcattaactgtaatgtgcatccaaactatttagcaggacatggagaaaattgtaatatatttgattaactaattgcatattggatattttctagtgcctagatatacaaagatgaataaaatgagctattccttgcccaatagaagttcacaatatgttagagactatatatttccataaaagaataagtatatgatgaacaataattgtgctgtgtatgttatgtagtgattaagagtggattttgaactgattctttagatttgcttccaagacccatttcataccagctgtttgatatttggcaagttatttaacctcactttgcctgagtttcttatctctaatgaagttaaaattacttcctactcctcacatttatgtgaggagtaaatgagttaatacaagttaaaagctcagaataatctctggcacattataaatagtaaacaaatgttagctatttagttattattttaaatattagcatattgttaagatttcatgttaatatattggtattaagattctataatacgttagatttttcttcagaacttctactgattatgtatttatacatattttagtgcatatatgctgatacagtgaagtaaaggtaacatatttatgtttggatgatcagatattaaagttgcaaattttacttcagcccaatatatttatattcccttttaaaagtctttattggcaaaacatagttaaaatattccaacccttagaaacataaggtggaactcatttctaacttaaaaattatttaagactattttagggtacagactgattctcttagaaagtgttctgctttctattatcttagcgttggtgtttaagttgtataaatttatggcagcgtttggaactagctcaaggtttacatttgatcaggatatgtggtcagattaaaagcagtttttccttagctctaagcctaatgtcaatagaaaactatattgaaaagaaaaatgtctcttgagttttcagaatatgttgtgtaattccatggtaaatacaaatataaatattgtgattaataaaatgagaaaaacatgagaatttagatgcttgcttcctaagttaccaaagtgaaaagaggacatttatttttgtttgtctttacctcactttcacaaggaatttcagatggaacagttgccagtttataattctcctcttgaatattttagtgtcattaaatgggaataatttggatcacatacaagattatgatggaaatgatagaatgatgtaatgactttggagcgagttttgtcttgtctcaggagaactcataattggattgtgtttatggaagaagatgaagaagaagagacccaaaaatggaataacccttttatcttcatctgactctctattcttgtcacagtttttatcttcaggagggcacaaatagcctctatctgatttccctatcccatgcatagggttttcttaaagttttttcacaaagaagaatttatttttaaaaattctgttctattcttcatgtgttatttttaaatgagtttcacagagatactctgaagctgaagaggttgtttttaataatctgatgttacatgataagtactggaaaaaggtggatgcagggagtgggtggtatgataaaatgctgtgggtgtaggtcctgaactgcaggttggtaaatgtttttttggtaagtcaggagataatttaagcttacttatgtgattgctctattccccataatcctttgcaatgcttggtgagacagaatgaaagaactccaggtcttagctgtttgttagtgaactgctttttcttagagctgatgcttttggttatcaaggaagtctggatagtgatgaagacaagtgttgacaggagggaggctgaagattagggttatttttttgagtaagaaaacatgtaacttaattgtacacttaaaaataactgaaagagtgtatttggatagtttgtaatgtaaaagggtaaatgcttgaggggatggacaccccattctccatgatgctgttatttcacattgcatgtctatatcaaaacatctcatgtaccccataaatatatacacctactaagtacccacaagcattaaacatttaaaaattaaaaaatatatatgtgcatactctttaggaaaaaagaccactcccagttcagctaatatctgtgatctttttggatattttactcctgaaaatggcttcgatggcttcattagaaacaacctaaaatatttcttttccatagtgaataaattctgaaagatatttctcctcataaaatttaactaattaacctaatgccatccttggaatatttaaacgctatgtctgttgtgtttggtttaggaaaagacaaccctagaacccaatttttttcagattttgcactataaatttattcatatatattaaacaaagttgctgacagaaaaaaaaaaagttgtatatcctattacatgtgtgatttagtaatatcctttaggacacaataacaattatgaggtacaataaaatttcattctgtgcagagcttttcatggaacctctaacctcaattcttccatagcactgtactacaccacgcagtaaagaaacattttttcaacttatttagtatttgaggtataaaatctggagggggaaaaatgaggatttcagttggatttgaaatgagatggagagttaatgaaacagagagatacaggcgggattccttgggctgtcaagagtagggaagattgaagaggcaaaaatgaattcaaagtgcataggcagatgcaaagatatccatgaaggtctatcatccatgatattaactagagcaaataggcaaattttcttttccaaaaggaagctatatttaaagaaaaattaaacataaggggaaacttgagagtgatttgtaggaattcacatcaagcgggtggtcctgtttcttagcccatgctgaagcattccccatctgtcatctgaagggaaagagcattgaattcgtagtatgggagtttcccctgtggaggaatgagaagatgcagtgtgcagctaacaaccaaggcttgggggtggaagatgggaagaatctgaagagcatggaggtattagggccatgttagactgaatgaatgaaataaatacgggttagagaaaagtggagggaggaaaaagtaaaatcagtcaagaattctaattgcttactcatttggaaatgaatggacacttatgaatgagacctcgctgcccagaagataggaagtagcttagaagttgtttcctgatggataaagcagtgtgcagattccagtcacttgggtctgttcttgcttctcatgagcacacacctcacacgtacttgacctgagaggagatgctcttgttggaaactaagatttttttgtcctctcgtgcctcacattatgcagtcgctggaggtgaaagatcaaagctggaaaagtcatctttgaaggggaaacacctttcctcactcatgtttacgatttttttctgtcttggtttcatagaaaaactatgcaggtagccagagccctaagttgttgtgccatctgtaaacctgacatcatgtgcaaataacaacagatgatggaatttcacctagggtctgatcgtgcccagggagacttcataggctccaaatgcctgcttttatcttatacatcgagaagccattcaaactttcagggctctgccaacttggcaagaagaagagttggcaagcttcccatgctagttttcttttagtttgaaagttttgaagtgggtctgaggttgtgataaatgcttgtgaggtctcttatttgttgactgtaagcttttcatcatttgacatgaatgagaaacatcattcctttgcaaggatattcccttttttctgtttctttaaagttatcttagagacttctcagttactgtatgaaaccataaattctctgagcaaatgcctgttttgacagagagctttaaagatacatggcaaaagtttaaacaggtcctaactgatgggatttaaatactgtatatagtaattaaatagttgtgctaataaaaccctaaagcactgcttgcatttttcttctttaatctctcaaatttttctccaagactcaaaattcatgaattaaatgagttagccaagggaaatataattgtgttaaatttcctaagtgctttacacactgatgaaaaaatttaaagtttataataaatctacaaattataggtgggggctcattttaccacatagcttctttaaaatgaaactcccaagcatggtaaagaaattgcatataaatacttgctgcagaagtaagaatacataaaaaaactcactatgtacttgagtctatttgatttgttatgtttagatggctcccatatgaataaaataacattacaacaaagcattttatgactttttcatatggattgattatatattgtgcatctcaaataatctctatctcctttaatattcctctataagtcaccattacatagttttagttcttacataatgggatgctattaaatttcttctcccccttttcttaaaaacaaaaacaaaaacagaaacaagaataaaaaaacactccccaaaatgctatgctatctttttaaattttacaacatttttagccatgggcttcatatctagctcaaggtttattgtctttctactttttctaaatgatttaaggcttctctttctcactggacttaccataaagtgacttcttgctcttctgtcactttctgaaccaaaatttctagcctcattacactgtgagagacttaggaccaggggcagaagagaagccttgactctctttgaggactagcataacatgatatgaacatagcaggccactgatatgtgagcatcccataaataaaagagaattatcgccaagaagcccttactcagccagactacatttccagtttctcttgcatctaagtggaggcttgcatctagttttcaccattggaatgtcagataaaatgatgtatgttctttctagcctgttaggaagcagatgtgacttctccatgctgcctttccctgtcagctgactggctatagaagactctctggacatcacaatgtcatcctagccacaagatcaaaaagagtagagtttctgtgtcaccatgtggagaaaagttatccaccaatctgaaacaattacgttagactactgcatgggcacaaaataaacctctgttctgttaaaccactgaattttttttatcgcaggtaatgttatcttcactaatacagggaagaagtcctgctgcttgtcagacttagtagggcccactaatcctgttgaacccagaagaacaggagcaaagctgctctagtgtgttgaatggcgccaataccttgtgaatgagagaagtctgcttgaccaaaagacctaggatacaatggatgccttctacaacttcctcttagtgactataaaacagagaaaagcctcttctaggacttccatggtagattttccactgcttaagcaatagcatctgcttagtgaatatgtctgctaaagaaaaatccagacaagttaatattcacattttatttaagaatattctagatgaggaagcaataattgaacaactagaagtgtaggctgtcattaaattagagctaatagaggaactggaagagaactttatcaaaaagagaagtgctctcaagaagactgaagaaaatcgtgaaaaaagagcattcaaaagtattctggaacttaaactgaaaattctacaaagctcaatagatgagctgaaaaagaaagtcactgtgttatttatcatgtaagattaatgttaggaataacacataaaagaaatatttcacaatacagtgcaaaaatcgaaaaaaatccacttaattgtaaaactagctctgaaaaactgtggggaatatatatggagagatccaatatttccacttcttgctctgtatacaaaggaattgaaattagtgtgccaaagagatatctgcactcccatgtttattgtaccattattcacatagccaagatatggaagcaacccagtatctatccgtagttgaatgaataaagaatatgtgagatacacacacacgcacacacacacacacacacacacacacacacacgatggaatattatacacccttaaaaaagaagaaaattctggcatttgtgacaacatggatggacctggaacattatgacattatgctaaatgaaataagccaggcacagaaagacaaatactgcatgatctcacttatatgtggcatctgtaaaagtcagtctcacagaaacagagagtgaaaaactggttagcagaggctggatggggatttggagagaagaggagctgttgattgaaggatactaaattccatttagactggaggaataagttttagtgatctatttcactgcatggcaaatgaattataaggtattatgtatttcaaaattgctaaaagaattgatttttaatgttcccatcacagaaaagaagttggtaaggtgatagatatgttaattagcttgatctttctacagtgtatacatagatcaaaacattacattgtacattatatattatataatatattttatataaaatataatttattttatatattatatactttatataaaatataatatactttatagtatctattttatatctataaaatcattatctctcaaataaataaataaataaataagaaagaaatttacctagagagcaaaatgccacatttataaacctttaaagcacttgggtatcatattttgcttaacaagtattgctcacctcagagtcttaaaatgttctatttaataatactattattttatctttcaacatttaatttttaaaaatgtaatttttcactctgatgataatttcttttgctgtgcagaagctctttagtttaattagatcccatttgtcaattttggcttttgttgccattgcttttggtgtttagtcatgaagtctttgcccatgcctgtgtcctgaatggtattgcctaggttttcttctagggtttttatggttttaggtcttacgtttaagtctttaatccatcttgagttaatttttgtataaggtgtaaggaagaggtccaatttcagttttctgcatatggctagccagttttcccagcacagtttattaaatagggaatcttttccccaattcttgtttttgtcaggtttgtcaaagatcagatggttgtagatgtgtggtgttatttctgagggctctgttctgttccattggtctatatatctgttttggtaccagtaccatgctgttttggttactgtggccttgtagtatagtttgaagtcagataacatgatggctccagctttgacaacctacagaatgggagaaaatttttgaaatctatccatctgacaaagggctaatatccagaatctacaaggaacttaaataaatttacaagaaaaaaagaaccccatcaaaaagtggacaaaagatatgaatggacacttctcaaaagaagacgtttatgcagccaacaaacatatgagaaaaagctcatcatcactggtcattagagaaatgcaaatcaaaatcacagtgggataccatctcatgccagttagaatggtgatcattaaaaagtcaggaaagaacagatgctggagaggatgtggagaaataggaaggcttttacactgttagtgggagtgtaaattatttcaaccattgtagaagacagtatggcaatcccttaaggatctagaaccagaaataccatttgacccagcaatcccattactgggtatatacccaaaggattataaatcattctgctataaagacacatgcacacgtatgtttattgcagcactattcccaataacaaagacttggaaccaacccaaatgcccatcaatgatagactggataaagaaaatgtggcacatatacaccatggaatactgtgcagccataaaaaggatgagttcatgtcctttgcaggtacatggatgaagctggaaaccatcattctcagcaaagtaacacaggaacagaaaaccaaacaccatgtgttttcactcataagtgggagttgagcaatgagaacacgtggacacaaggaggggaacatcacacaccggggcctgtcagtgggtgggggactaggggagggatagcattaggagaaatacctaatgtagatgatggattgatgggtgcagcaaaccaccatggcatgtgtatacctgtgtaacaaacctgcatgttctgcacatgtatcccagaacttaaagtatagcagaaaagtttaatttgatgtattgtatataggatgaggtagaagttcatttttttccacatgtatgccatttatcagtgccatatactaaaaaaagtatccttttcccgttgattttaaatgcagctttcatgatgtattctatccttttctggtatatattttctgggctctttttttttaaccaatattttgtctattccagtagccatatcatgctatttggttatgatgtcttcgagactgttataatgtttggtgaaaaaagtactgtcagtactgttttcttttttgtaaacatttttgactttctattcattaattgaattttaaaatcatttgtcagtttacaatggttactggaaaacattgacgttgtaattctatttttcattgcttactttacatattttatatgatttaacacttttaaaaataaagatattatacctccattatgaaattaatttttacatgttttataatttatattgcttttgtaagtaggactttttaaaatatccactattatttgattattattgctattattgaaatgctgctgacttttttatatgtatatttgaatccagctactgtatttaattatctaactaactcaacttctttcttaaattggaaacaaagactgtcttttcttcacaatatttttacaaattatgtcatttttagagtcatttcattagatagaacttcaaaggcaatattgaaataagtatgataaagcagccttctttatttttttctttatgtgaatggaaatcatttcagtgttgtcctgtatttggtgtttgctgttggactttcataaatagtctttaagatgaatcttcctatccatatgttaagtagagttttattacagatggctactgaatattactaaatgccttttaggtgtttattaatacaattacatcatttttctcttcttatttgttagagaaggttatggtatcctagaatcagagagagaaaaagtcaagaaggaaagagtggcacctttatataaaaatataaagcctggcttatgccctggtgaaacattcagcaagggagataagactaaagtgtttatatcagcactcataggatataattcacatgaaattatgcagttaagagaggaagcacagatatgagtgaggtctggatttcacaggaaaggctttttgaaaaatcacaatccttaaagctggaacaagataggacaagcttattcatgacattatgaaagcagagaaaagattaaagaactgaaaattgcatatatgtggtggcgaaaaagttattcagcccctagaaatgaaaatactggtgactttaaatatatgaaaacaatacaaaagataatttgttcttcttcactagagatagacaagagaatgactaaagtactaagttaaacaaagaaaattatagcaatgtgaagtgttagtcactggaatcttttacctcccaacacagttttctgcaattttaaaaactttctcttctgcttgaaagcagggacaaggagacctttcttagaatcaagattcattgattttatgaagtatattcagaaaaaccagttctgctgcttagtgatctgtttactcctgaaatcctgaagtgtcccaaactgtagggaataagatcagaatgtgtagggtttttagaacctagaacaccatgaaattgcacaaactagggggaaaaggactgaacaggcacttttcaaagaagacatacatgcagccaaaaagcatatgaaaaaatgttcaacatcactaattattagagaaatgcaaatgaaagccacaatgagataccatctcacaagtcagaatggctattgttaaaaagacaaaaaataacaggtgctggtgaggttgctgagaaaagaggatacttacatactgcttgtgtttttgtaaattagttcagccactgtggaaagcagtttggcgattcctcaaagagctaaaaacagaattaccattcaacccagcaaccccattattgggtatatacccaaaggaatataaattgtcctaacataaagacacatgcatatgtatgttaatcgcagcactattcataatagcaaagacatagaatcagcctaaatgtccattaatgatagactggataaagaaaacatggtacatatacaccatggcatactatgcagccataaaaggaacgagatcgtatcctttgcagaaatacggatggagttggaggccattatctgttcctgcatttgcaggaacagaaaaccgaataccacatgttttcacctataagtgggagctaaacaatgagaaaacatggacacaaagaggcaaacaacagacacgggggccttctggaaagtggagggagggagaaggagtgaatcagaaaaaatatctgtcaggtactatgcttggtacctgggtggctaaataacctgtacagcaaaccctgtgacatgagtttacatgtatagcaaacctgcacgtgtacccctacacctaaagtaaaagttttttttaagtgcacaaactagaggcttcttttaaaagatggtggagtgtaaagccaatttatttgcactagcttcttttgaaacccaacaaaaacaacaaaaaagaaagaaaactcaagaaaaccatcagtttatttaccatgattcattatgcctgaattctttactctgatttatttctttgatgcttatccttgagtaggtttgtttgcttgttggtttgaaagacaagctcaagatatttcactgtttgaggttttttttgttattattttttttttttctgtttctacagcttcttttctggcctagttgaactacttttattgatcagaattggcatgttacaatctacatactaatccacatataatctttcgctccttgctcctagtttttcatcttccctggtgaactaccgattctttataattcagctcaaatattaataccacctactttgtgtaaactttcctgacttccccaggtagagctgactcttccctcttttgctacctttgtacctttaccatttctttatcttccacctgtaatgataggcttttactttgtttttttcttgtttgttatagaccaagttgggatcagtccctgctctacttacctcctccctgagaagcttctttcttcaatcaggggcaatcttaaacaggacattagcactagatacacacagacacagatacacacacagacatgcacgcgtgcgtgcgcgcacacacacacacacacgcacacacacaccccccaaataggttttcttgaagttttacagaaaattcctggggagacatggaagaggattaacatgatgcactccaaagcacagacttaataaaagtgcattggctacctctatttttccccaagcaaaatacctcatgtttttctttctcataatgtcatctcttccatatgctttctaaaatgtgcccttcctcattctaagcaggttagttgtcaccctcagcttgcataagccacccagcagagcaaaagcctctgttgtttctaaaacctgccctcttgggggcctcttccttccccttaggttgcttatcacagtctccagtatttgaaaattcatctctcttcttttggggagccagtaaatagcaacaggagattaagctgctaataataactaacatttatagttagcttattgtatgccaggcagcatactaagtactttctatattacattaaataagattatctttatatccctctacctgcaggtttgtctcctacggaagactgtaagcatttgcacagtgatgactatattatttttttctgtattcttaatacttagcaacatgcctggcacatagtaagcacttcataaatgcttgttggatgaatagtgtgtatgcattgatgtgatgtaattggtggtgagaagaatcagcctgttcacagtaactttagtcatagttctttttatatttgttttttgttttcacttcaccatggttgtcttccactattcatcatgtagtcagtacaagccctggttgtcactctgttagccatggatattttcagctcttatattctgacaactaattattccatgggaagtcttttaatcaggattctctttgtttatattgaaatgactaatatctttctcacacatctcatttcagcaatatgagttgatgctgtattttggatcatgtattttagaccaggtggccaggcagcagcactccccaccaatgcagacaggttaggttttcagtctgtgcttggtgcatctctagggggttaatgaagccttcccgtcgaagccgctgtgatgagaggacaggcaggactcctgctccctccccacctgctctgagttctaatccgagcagctcttcttctgtctggtttacatattcatcttttgggtgaaatggtgttaaatataatatatttgaaaacgattgggttaaaaaagctattctatttaaaatatcaagatggccatacataacacagatagataggtcctcaacattagcaggttgggtagtgtagtcaactgctgaaaataaatacagcacaacccaacaaaacacctttcccctcaaacactaacaaagtaaaataaaataaaagcaaaaccctgaaacccaagcagaaatgtaaagctgaagagacattttctagattggtcagtcacagcagtgtattcagaaggcagttcttcctccgggtttgagaggcctgtagccatgtatacagaaactatcttgggtaaggtgcctctactctgtcgggcttactatttaagatccttagtgggtgtcagaggcctttggcctgtactgcacaggtcttttcttgtttgtggaacgtcaaattcattttctctccaacaggccttttggtttcttaaaactctccggttcttgtccctgcacgtttttccctctcaatggcatttgactcaggttgccagtcattaatttccttgtatggaattaaggagatcttctggtccattctgtggctagaggcaataagagaacccatcctcatagatctagtctcaacatgaagcattagaatgtaaactcccaactctagaatataaataaggtcactgaggacagggatttctaactgttttattcatagatgtttccctacctcctagagcagtgtttagtaatctgtaggcactcagtaaatattgtttaaatgaatgaaggaaggaaataccggtctcacagtcacgccttttatacttttgagaatgaatttctcaactgtcttatccctcgatctgttattaactatgctaaaaatatttcctggctttgagtagcattgtagaaggtcctcttccattttccgattttcatagatgatcttccattaaaaaaagacgctggcatgtttctgctgtagaaaaaaggaagcaaagggatagttacaactccttctactcttctcccccagaaaaacctttcgaggcctcaccaatagatggcttgctttctcctccaatcaccagcagacagaggggccctggtgtactgctgtgttctccacaccaagggggaaatgaataatgtgtgagattcctctctggaatgttgagtgtctcaaccttccttctacaattatattttctgcttcacggtgatgacagcatcacctgtgggttcagaatcagagacctccagcttctgtccccattttggggtaatgtatgtgccacctttcttggattttatttaatcagtgagtctcctccccaggagattggggactcaactatctctaaacattttctcatcttttcttcacctagggttcctgggctcctgttgggcctcactggaagctcctagggttaaaccaaccttgggcattaatttcagtgtctgttctccacagtcacaaaaatatggacctctagttacacttcataaaatagcagagatcctacctagtccactgacagatgtcagcatagcatcctcttctagaaatttactagcttatgttttctgggtacccccaaattctatagcaagatctaattctcagtgcagatcttaacaccgtatctgagtattttgtgtctatatgagtttgcctattcataagagtccagcgaatggtattaaacatccccttttgtctcctgcaattgcccttagatccttcctgaggatatgccagtctagttatgagaggtgatccggacgttgttcatctagagttaatctggacattgttctagataaaacacacataaaaccatgaactctaaaatgtcctcagtcctttaaggatgatagaatgtgcttataggttatagctaggttgattatataatttattatttaaaacatgacaccttgaaagcaaaagggaacggtatttataattacattgcctcagaagtcataaaccaggacctgtagtcactctggttatggcagaaatcttgcattggaaaatctttccttcaacttatttcaccctacatggtgaaaattttttaaaactcttctttaaagtagtctttcaccttaaggattcactttttccgaaccaccaatgtcctttccgatataattatgtggtctaattcacccattccttcacattgttcatgttcttaaccactttctctatctttactagagttggctagggctctagagatgtcctaagctttttcttgaatagcagctgactggacaagtgaagactttcttttctaacttatcctaataaattggaatctcacttttgttttgtttcaacgccaaatgaggactagcagtggcaagataagggtggaacagaggaggaaaaggaaggacaggataaaggaaggaagcctaccacttacgtatacatcacacctgggatgctcatgctcttgtcccctgcctgcgttagccttggactcactgctcccttgagatgccactaagagggaaagggagagcatatttagaacactcaccccaccccaactttaccaccttcactgatgctcctcaagtccttaaccttctcgctagcttccccagcctccttcctggtcttgagcagcattcatgcggagtctcaaatcagagccccttgccctgcttcctcacttgcctcatactgtctctgtattgctttcctcttgcaagaactcgttcaccacactaggagaaaagcctagaagaaccctattcttattgctttatggatgagaatgtaaggggttaggaagagcccccattttcttatctttatgttgaaaacgcagggtgatatgtggtcttgacacatcaatttagaattccgaatttattttctcatcaaaacccctttataactggccatttggtttcaaaatactacaagtagtacccactggatatattagctatattggtgtttaaatagatgtttatattcttatctatcagtctaattaccatgtataatagtatttccatacaaaaatctgagcttagttcctcaagattgctcagataaaatttggggagattgtctatttataattaggtctatctcccttttttgctagttctcatttgaatacattcaattccaagctgttaaaagttagcaatgctaatgatagtgatgatcactaatgtttattaagcagccttcatgtagcaggtgctgcgttagttactatattgtcattataattcatatctcactgtgatgaaagtattatttccatattacagatgaggaaagtgaggcacagtgaagaagagtgaggggcttaagcttatgtaatgaataaatgataaagctaagattcatgcccaggcttgtcagactctgaaattggcatatttttacaatgccatgtggccacctgtgcctggccatattttaccatgtgttaccacgctggtgtgtctattttaggttaggagcaattttagagagaagcagtgccctaatctgcatcttcaatgccatttaggtatgttagttaggacagttggatgctaaagcacttaaagtaacttttaggtcatttgcattttccaacagtggtaaatgaagatatcaaataaatcatatattccctttgatttggagttgcttgctatgttctctcccttctgctggtttttcattcattgcagccaatagctattggattcatgttgttggctaaatctaccctttttctaatcatgcttcctgaaggttggagggggaaatatttgccataaaattgatttctaagggcagggcaatgagtaaggccgatatcggaatgttgatagaaaaaagcccttcttttgtcttgttggctgtaaaatatcttgcatggcccagagtacaatgaacttaaaatacaaggagagcgcagtgcaagtcaccatgatgactctgacatcagtattttccatatctcttttaacccaattgtgactttgtagaatgtaaattgcatagaaaatatattttttcatactgtctctaaatcctagtttcctttcttgtcatattcttttttttatttttcaattaaaataggatcctgttttcctttcttttcatagtctttttttatttctcaattaaaacaggatgggtaaaaaggacacaaattctgccattgcaaatgatctatcagttttgggggacatactgactcaatgaagatccagtgttgtctttcaaaatttcatttacattccgctcattcacacttttaattgttattcccttaaaaattaataaataaaaggagccatcttgtttacatatttctgcactttttttcttcatagacagaagtctttcaaatctgattcatatttcttttcagattgcactcttaagttcaactcttcacggacgtctataatattccttatctcagctagttctccagaatatgcttatgaaacagaaaaggttcccttgtccccctcacagggcatgtggtgggggtgtggctcacttcttcagtgtcctgctgctgaaacctctaggggagcatacaaactgacaggctgtggggctccaaacccacgacagtgtctaggggtgaacgctgagggccccagtgggctgaagccccagtgggcgtgtgttacagggtgcttttttagtttagccatttgtaggtggcttgtattagctcagttagactgtggtcttaattgcagagacaaagggctttctgtatcctgggactcttgccttggtgttgtacggatcatatgtggacttggagaatgagtgcaaggttttattgagtggaagtagctttcagcagatgggggagccagaagggagatggttttcccctagagttgggcctccgcttggcggactgggctctcctccaactgccccagccaaactccatgtcgttctgctggttggtggcctgctggcctgccgacgtctgtcagtttgttcttctcgacgtccagccacctgtgtgttctccgctgatgtgctcctctccatatccagttgcttctgtgtttgcctgctagggtctcgcaggttttcgtaggcacacgatgggggtgtggcagaccagggtggtcttgggaaatgcaacatttgggcagaaaatgcctgtcttcacctaggtccatacgggtggaaccctagccagggaccatgctctcctcctagcacttcccttcctgccttctgtatcatttaaagggaccactctcttcccttcccagcactcccatatcacttacaaccaacctctgattatataggcaaaaaaaaccatggttctagtgaacaacctgaaaaccacaaataaaagatgcatcaacgaattatactgacattataggaagatatgcaaatgtactatttctatggaatgaatactctggggacaatgtctcacgctgtgcattatggaatcatgaatttcagcagtttcatttttctgtgttttacattaaaatagcaaagaaagagtacatgtctagaaaactatttcttagtgacctgttagacacatgccagaatgtctaatgtttttcacatgtggttcacctgagcctgtaagatttgataatgcaccattctgaaataaatgagtgcctctaaatgtagtaacacttctcatgtccacttaaaggtcaattatttcaaccattatggtttaggaaaatgggctggttaaataagctgagtaaaataagcagcccagctcaccaagaaaggacctgatttgagagaaatgggactaggcttgcttttctcaagtccatcctcaatagccatcagtatcatataaactaaaatcttatataatcttattttaatctcaatataagataaaatctgacctttaataagccccactgtctacactttttttttttttttgagatggagtttcaccctcattgcccaggctggagagcaatggcatgatcttggctcactgcaacctctgcctcctgggttcaagtgattctcctgcctcagcctcccaagtagctgggattacaggcatgcgccaccacacctggctgattttgtgttgttgcttttttttttttagtagagacagggtttctgtttttttttttttcagtagagatggtttctccatgttggtcaggctggtctccaactccagacctctggtgatccacccgcctcggcctcccaaagtgctgggattacaggtgtgagccaccgtgcctggactgaagtctacactccttaacatggtgtacaaagttcctgatctcgccactgccagcttttatagcttttttgcttatcctctctgtctactacttttagccacctgaactgctaatatttccttccaatgtcctttgctttcttagccctatgtctttgttaggctgacttttctttttctccttgagatgtctttttttctttttgcgggggttgggggggcccaacatttctcgatctcatttgtggattattttcaggatcactgtgttgtccagaaaacggacatggaccattgattaggttgggttgggctgtcttctctaatccaacagtaatagaataaccaacacttacagagtaatgtgagaggctcttggtacatcctgtaggtgcaagttatctaatttgacccctctacccaccctatggaggaaggtatatgaggctgggtcttatgtaataataactagagcacggattaggtactggcttttcagtatcttttcctcccatgcctttatccctatatctgcatgtataactaggtccagaggtgggtaaaccttgatgagttcattcacttctcatattcagtgattgctcaggaaagggcacgagattgggttgtgatctagagggcactaggggagctattaggtaggttgcctttacctagaaagatgagatcgtctgtatgagagcattttgcacactgaaaaagccatcatgctagttttaggcttcaagtaacaagaaacccaaaagattaaacaacaagatttattatctcacatcacaagaagttcagagataaggcagttccaggattagttaattcattagttaataacaataaatatataattaagaacccaggtctcttttcatctttctgccctgccacacttagtgtattggcttttgtcttcagggttttcacctcgtgtttttgatatggctaccacgactcctagactacctcattacacagcatttacaggccaggataggctcctcttcatgtcattatatgacaataattttcatgtcctttttaaagcataaaataaaaattcccacacacctccaataaaactttctgttctgtcccataagctagaactgcatctcttgcccattcctgagcagtcagtgaaaatggaagtgaaatgacatgattgccaagactgatcaaggtttattccctagaaggattgagtttcccagaggcacatagtcattcaatgtttgaatgaaattgggattttggtaaaagaagaaggggctaggtcatgtctttttattaactagtggtacctgccacagcactatacaaatatgagctctcatttttaatattagtatatcaatgtttaatatatggcagtggtttcagaaagattcatttttgagataatttttaagcaaagagggtaatagtgttttctttcccatgttttaggttgggttgcctcagaagcagaacctaaaacaatgatttgagtgcgactagtttatttggaaggtagaggcggaggggaagtgatacaaggatatagggaagagaatggattatcactgggtgaccgaagctcattgccataggggcactctgagaaatggtacagaattacatgcagagttatccctcagaaggaggaagggagctggggtaattgtaccccagcttttgccagttatctgttgagaaactcagggaagtgtgttaatgtccccagggcccttgtgatatggtgttttgcagcttgtggggaagctttcaggcaaagacatacagatattggaagctaaaagtcccagggaactgataaggctcaggggatgtgagaccaacaacaactgccacattcctttatgtccataacacaaaataaagagcagaaatgtcacagagcctgcaaagggatggagatttgtttcgtcaagaagggaaagaagcactttcatattttttatttagctctcaaatggggtactttctaaagctgtgtgatttatgtatgtattatagccagttgtttccctgcacactgcttacattcatgttatattctggcagaaaaaatctgattttaattgctctaaaaatacatgttcttatctgcaggatttgtattgaggcttactgagagcagcttaaaggtcaaaaccttatatttaaactattagctctaattgttagcggagtacattttaatgttacagagttggttaaactgctggtatccttccaccttccaagatgattaagagcgcggaaaaataatttatcttaaatttttaagtgtgtgtttaattttctcatttatggcatacgtaacagaatggcaattaattattaagtctaaagaaagagaatcattgttcaaaatcagtacactatgcttcatttaactcctataaatatcacattctagagacataaacttgcgcagtcagtagcaaaaggtggttgttaataatctgttagtcactgtgtacactcaattggccaagcattttctccacttattcttttgttattttctcttttattgtcccaagaatacaaagcaattagccaaaattatatgacaatctctggaaattattttattttccatttgtggtttggggacagggaaggtaggaggaggagggatggaaagaacttgtcaaaaattgaggcaggtgtagtagattgaaatagtaggatctcaaaacatgtccatatcctaacctctggaacctgtgaatgtgaccttatttggagaaatggtctctgcggatacaattaaggatctcaagaggaaataatcctggattcagggtgggcttaaagtcagatgtacatttgaaacacagggatacacagggaaggtcagagggatactggagacacagtatcccagaggacaagagcttgtgaagatggtcacagagattggagtcatgtggtcccaagcaaagggatgcctggagtgaccagaagctggaattagcaaggaagattcttccctgtaccttctgaggtagtacagccctactgacacattgattttggacctctggcctccagagatgtgacagaataaatttatgttgtttcaagtcaccagttgtgtggtaatttgttacagaaacccaagaaaacttatatagcaggtattttattagtggtagtaatgataatggaggtaacgttttgcctataattttatagtttaccagatgttctcatctatgattatcagagtcaaatggtaagctgaatgatacatagaaattaaatgtcctgccccagctatagccataagcagtccagtatctcagacacagagccactagcccacaagaagctacctccgggaagggaaggttgaggagcttcctcaagcctctaaggagtaacaaatcctggtggaaagttttttctccccaccccatattttctaaagccagccttataaaagctgtgcttccattttctcattaaacgttcctctcagccagcactcgacgttcactgtgtggacacattccaatgagttttgtttttttctttaccatatggtgatttcaatttgtactcactgtagattcattcatttctttattaaatgcacatttacttcatacttcccaaaggcctaacctgtgcttatgctgaaggacaatagcagtataatgattttagtacccatgtttcttagaaacgtagccttcacattttgtgcacaaaacaatcctgtataactaatcttttttttttttttttttgagatggagtcttgctctgtcacccaggctggagtgcaatggcgcaatctcggctcactgcaacctccgcctcccgggttcagccattctcctgcctcagcctcccaagtagctgggactacaggcgcccgccaccatgcccggctaattttttttttttttttatttagtagagacggggtttcaccgtgttagccaggatggtctcgaactcctgacctcgtgatccgcacgtctcagcctcccaaagtgctgggattacaggcttgagccacaactaatcatttttaacaaaaaaatttaaggacaagatttgtgcagtattaagagccattacttattactgtgtgactgagatcatttatagtcattcaatgtttgagcaggttagttttcattagcagtttctcccccctcttggttaagagagtgaatgtttcagatgtggtgacttggttgcctgttgttcaaatatacgctactggcagtttctcaaaatgtcaatcacttcatctctgctttaatttactacatatattgctcagagtgctgaattaatgatgtgaacttgaagtttcaggtcttcaagtaatccctgggtgatgcatcgggattaggcctttgtagtagaaattatggacatgcgtgctgagctttttgtgtcttgctattttttcagccttgtatgaagggccaaaagatgtgaagccttattaaacccagtttatgggaatctgttgttttggactgagctcctgcaactaggcccataccagaccaaaccagaatggagtcactcttgctgggtgccatgtaataaccaaactgaatgaccagttttccaaaaaacaggagatttcacagcaaccaatcagaaagggctcagtctacctaaagcctggaggataaggaaattctgtctactttaaccttataaggaaagtaactttgaaatgaccaatctgcttttcgttctttatttcttgatccttatttctgctttctttagcaatttctgtctataaagtcaacacctgctgctcggctcatgggagtttctcctgttttgtagacaggatgctgctcaattctgaatcgctaacaaaagccagttctatctttaaacctcagttagtgaaaattttgttttttgacaagctataagaagcacatagccacatgacttatgattatacatttttagattatttcttaactattaagattctcaaaaatgtttaggaaaataaatgacctctaggtttaggtttatggtggactaagtggtgaaccatttgatcttgaaaaaagaaaaagaggatgaaaagtaacaaagttgcactcatccctgatttctaaacatctggtcatattaaaagattctcatgtattccagaacttaaagtataattaaaaaacaagtttctcttttttaacttttaatcctaaatagtatgtagttttaaattctcatatactattgtatacctcttttactacaatcatcactttctttgcaaatattttcattggaatcactagtaaagccatatattgccttattcacagtccaggtaaagaatttgagagccttcttacctgtgtttggacattcattttttggatatactttaatgtgtccacatggatatacttttggatacgctttaatgtgtccacatggtaacttgaagcaatagcaactatgtttaacttatcaaattttccataaaccaatttgatggtcaatccctgtaatatttagttcttcttctgcacaagatatgttcttgttacaagtctttctacttattaaaaaaaataccagttaaaagagaaggacatttaggctctatcttttaaaacctaaattattaattacacgtatgtttcttgaggatggtgtggagatccagctgtgaaagcctaaaacacaggaagggccacaccgtcagattcgagcgttgctttatctggaagggtaatttcattttcctcagtgtgagtggtgaacaaagaggaactaaaggtagagaccagatggagaactgggtcacttttctgggtcttgttgtatttggatttttattctttgactcaagttttgtttcagatgtggtgaactttaagaaaggaggatatgctgacgttcaaatataaatatgtattatgttcttacttttatccatgcttctgttttcctccactggtataaaaattgccttaaatatagaaaagaaatttttttctacttaataatgtatgttatgtataattgggatcaatgaataatctcgttgatcaagagtgtcttcaaatacagatgtattttagaagggaatggagattgctttatgtttagcatttcaatgtgtagcatttcaattgagcatctactttggatcagatcctcagagtctaaaaatagttttaaaataatttcttcattttcaaggggcttaacattaattgatggggagtaggggaaggatagtttttgaacagaaaaataaaagacagttactaaagagaactatgaaatatattgttgtccttggagacagagtctaaaaatagttttaaaataatttcttcattttcaaggggcttaacattaattgatggggagtaggggaaggatagtttttgaacagaaaaataaaagacagttactaaagagaactatgaaatatattgttgtccttggagacagaattagggacaatagatgaaagaggcaaggagagaggttctgacttattaccagaataagcttgataatgatccaagcataaaaaacgatagaatgactctgtctattgggagctgatgagtactttctagttagaaatatttatgcagaaaatgaatgattttatctgagtactactacttggtttagaggattgaaggaactgccaagattcctttagaatttgagattgtatttttgaattagttaggcatctttataggagttatcttggctgggcgcagtggctcacgcctgtaatcccagcactttgggaggctgaggcgggcggatcacctgagatcaggagttcaagaccagcctggccaacatggtgaaaccccatctctactaaaaatacaaaaaattagctgggcgtagtggcgggcacttgtaatcccagctactccgaaggctgaggcaggagaactgcttgaatccaggaggcagaggttgcagtgagccgagatggcgccattgtactccagcctgtgcaacaagagtgaaactccgtctcaaaaaaaaaaaaaaaaaaaaaaaagagttatccttttctccttgaagtcttgccaaggacttgggtgggcactgtgttggttaggtagctaggaagctgtggttgattaactgttaaagtcttgagtatatagtgaagaagaagaaacagggcagaattaattatgcattaaggcctcccagtatcttccgttagctgctgtgattttaccaggaccctcactttccttcactttccttggattagatggtcaggtggcactgaagtgacttgtaccaacaggcttaagcatgagaactaacctgatcatattatatcctaagaaggtattctagaattgaatttgtagaagatttcactagttcttcaagtatatatttttagattcaagtattaaagttagcactaatgtaattcactttgtttatggagaattgtttacttattagaatctataaaatagttttgatctaatggaaacaggcctgttggttataggagggaaatgtatcatggtttgacaaaaaaataaaaaataaaggagctggggcatgacagctcttagaagtaaaatcatttgaactatttgtcattgggagaaattacctacagtatcaaagagttgtcacaaagaactttcccctgatacccaacaacatatatgtgtatatatatatgcacaacgttgacttccagtgatctccatttaatataaaataattatctgtgacaattattctttaaaaatgcattctccattaacataagtggaatttcgactagccaacactttgaacttttatgtctcaagtggaggagtttactgggtacagaaaaatgaaggaaaatccatagcctgaatagaagagaaatgagcttagttttatattatactttaggaagaataaagaataatatatgagagttggaggtgtagagaacatatgtgaaatagttggcaattatttattttattccctttgaggacagttcatctttatacataagtattaacatggttaaatgcaaggaatctttaggagcaaaatgataataagaggttatttttatctttgaacaaaatctaacctaactgggctgaaacccaataggtaacattggtgtgtgtgtgtgtgtgtgtgtgtgtgtgtgtgtgtgcatgcatgtgtgcctgcatttatgtgtgcatgtatacattaagtcacattttttatatttgtttcacttttgattgaaggcagatattgttggagaacagatctatttgtgaaaccttattgggaacatccaaattggcaaaatgacttggtgcccatctgcagtaaattaagatgtacatctgactaggttggggcttcatgccagtgcctgtctcaacatgttcagtttttaactgaattctgtcaaaattccgagtcagataataattaatgccacagacatttaatgcatctttattatgcaagtgcctgtctttgtgactgtagatttagtcagaaagggtcagggtggcttcctggccatgatattagcctagagctctccctactccctccaacccccttccttctgttttctgttcactctcattctaccctgggattgatcactgggatagtggttggaaaatgttacttcattggtgaagaaagctcatatgagatctatgttgtttgaaagcattatatggtgtcctagttaggattcttccaaaagcaaaacctgacacagtgactcagatatgatagtttatttgataggtagttccaggaaacaagaatgagggagagtgaggcagctttaaaaaaaggattttaatgagcagattaaggataagggtaactaggactaagtcctgctatagatcttgtataaaatagcctcagaattgtctacacctagggacagggaagttgagtatttgttcacttaccccattcttcattgttggtgttttctcttgggggtgtttaatctctggcactttcagcctgccctaaacatggactgagcaggtggagaggcagaaagacacaagtgctttaagttggggagctgttggtgtgtataggaaccagatagcttcaggtgaactcagaggtgggctaagaggacgtgaagcagggcatcaccaatgtaagttccatgcggtttctattgaaaaggagcttcagggctctattaatgtatagaatgtctacttctgttttctccagctcatctacttgtctcaaaccaactaaatgaccaaaaggaaaagttggaaatggcaccagtggttcatcctgctcattttccagcatagtccgaaggtagacaattctcatactttgcccattttagacagtcttcctcaggatacagatggcaggaaggaaacaggaacctctcagaaatccgatgcagctccttactagatctctattttcaccttctttgcctcttctcaaatgtggatctcaaaataccatctgcttaattgacctaatagcaattgtagtggtagtgctatttgctatcttttctcgagtgcttaccatgttcccaccattattttagcactgttctgtataaataatcagaacaatcccatgaaggggatactataatataatgatcccattttaaaacatgaaaagaaactgaggtagagaacgattacctgtccaaggtctcaaccgtgggagggggtggagcatatgacctgagtaagctgtctagagtctctcgtacactgaaaccaatgcacccttttctcagggctaaacccagctcttggccccagggcaggactagaatatccctggtcctcatgccagaaggcttgtgaatcaaaggctggagcaatggaggagagatggcaacttattgtcacaagccttccctctgttacacttcctctcttcagtccattctccatgcatcatctgaaatgatatttaaaatgcagaaatcagatcacaatacacccctgcctaacactctctaatgagtcctactgcacttagagcaaaatccacaatttgctcagctactatgagcctgctcttgcctgtcttctagtcttcacctcccacctctctacgcatgactctctcagctctaaccacaccggccttctttctattccaggcgcataaggaactgatacccacctcaggacatgactatgtcccactcactccttcgtacattgtcatctcactgtcctcttgttatccttcagatgtcagctcagatgctgcctcctcagacaggcttctgctgaccgcccccctctcttactctaggcatcttattaccctcttctgttttctgtatagcatgtatcccattctgaaaaagtacctcatttattttcgagcctacatgtttattatctctttccgtgctccccacaacccagtctccaaatgtaagctccgtgagagtcaggactttgtgtgttctgtttcgctggtgtgtccctagtgcctagaacttcctggcacataatgagcattcagtaaacatttcacatatgactggctaactgctgagtaaggaaatgagtgaatgaatgaacaatggattaaaaatgtagatactttatcttagacaaaatttggcaacagtagaaatcaagacctttctctgtccagcttatgtgactctgttcaaaattatctcaattgtgtacaatattttgagctacaaacatttttctcctcaaaatctcatttttttcttttatttaggggaaggaaaaggcatagcagttgtttcctgaagcagttgttcccacatacacaagttgacacctcttttagcttttctgaccaagtttcaataatcatacacagaattttagaaataccttcttctggccatcctcccttgactcctgcttttccagtgggagatggagctgggaggtggtggtagaagaagggagagtgttgggggagtgagggaaggacctgtgtgaaaaggattggatttgaccatttagggaagggggacaatatgaaggccctgaaaaccagctattaatgatggggctcatttctgcacaggtaaatatatcagcactcatgccactaagatattttataaaaatgcttcctgaaacaaagtagttacttctaagtttccctagggaataacttttttaaaaattaaaaagatgcattcaacgtatgtgccataaatcctctatttttgataagcactgataactcaaagataatgctgctaatgtatagacaatttactttgttttcttcagagaaattgagaacttaggtcttgctttgtacacaaatacagaggtaacaaattctgataaagatgtgaatcatatttttttccactggttagtagagaggtagattgggaggaaagcattagatgtaatggcagctgtggcccgttcctggatgctaagcaaatctgtttcacatgtgaacatgttgggatcttttacattttgagaccgttttgcccttcttttaaaggtccttatagtctcataactcacagagaattatggtttagtttcagttaccagtaatattgtaaatatattcacatacatttttaaagacattatggcaatgtccttaattaataacatagccatcattttataaagagtcccaatttattaaaaataaaaccctaaaaccaaaaatgatgggataacatctttatgttgcccttgtttgcattcaggatgtttccaagtttatcatgtctgtgacctcagttacgtttacttccccagatggttttttaccacatgagcaattaatataattggagactatgaagtgtttatgtcaaggcaagaagcagtagcagcttcaatgtggtgactttgcaggcagtcaaacatatttcactgtgtgcttccaacctaacccttcccctgcccttccccttctatttttatattaaacagaaaaagagagttcacaaaggtgctcagaaactggcagtttctttcagaatgtggtatatttctaatttccatatatttccttcaagtggaatggccctgggagcacaattaccttcaatcttgacaggtataaaaaggccaatcctgccagtctctgattgaaatgttagatcaacttttctgaatctggcatgatgggtgacaaaagacagggatgttgctgggtcaggtgaagatgttgccataatcccttttacctattttgagcttctgagcaagaaaatcctatatcaaggtacattagcaccacctgctatcagcacccttagagaggctggcaacagagaggttctttaacttttataaccgtgctctacattaggagaggctcaaggaaagaaaaatcaggcataatctctgaagactttataatgagctcatgttctcattcttcatatagattccatttttctgtatgaaaatggtctgccaactgtccataattagccccatcttacttcacctggcaatatctagtgcttatgaattctgttggtagggaatatctttatgtggtgaatgcattctgcaaaaagtatacatcaaaaattgtaaatcatattacatcttaattacagaattgattcctctgaataataagcttataataaagccttgctagggtggtttcatatccttaaatccaaaatattgtgtttgttctttcactatcaatttgtatagactttatgtgacaataggtactctgaaaggggagcacacatatattaatttgcatttgatgacatactttttagaggtgcatttaaggtcttcccatttggtctggcaagttctgtctgcatggatctctcatccccaggatatttttagtgctccctctctgtttcttcctcttatctcccttcagagtccatcttgtcggggaagtcttctccgaccatctcatataaacctcccacccataccatgctttacttttctcctattacttataattacaaggcatattatgaacttattttctatcttccctgaactaaactctataaaactgggttttttctttaacttactgttgtatcttcagacctaggacagtgcctagcacatgtacacacagcacacatcacacacacacacacacactatataatgaatgcatggatatgtgaacaaaatgatgtgcttgagagggaatggtgtctataaaaccgccggtattatcagattcattttgtgtggttatgtttcctgaggagaaagagacgtattactgtttacttttggtttttatgtttatctgttataatagcatatggtatatctggtatatctaactgctcaagtcttaaatgtcttaaaaatattgattaatagatcctttaaataatatgattctaagactcatctgttctgatcatcataatactacaggggaaccacaagtcatcaaatggcatgaaactcaaaactacagaatgtaatctgggagacttataggcccaattttaataaaccacataatgtttttaaaatgtataatttcattgttaacatttgagaaattcagtatattgcacataaatatctggattcccagcctttcttgaatagcctgaacgtctgctgacgcgagacacctatgcctgcatggcatcagttagctggagctgaatgtgggtgtgttgaccgcagtcgccatcacacccttttgtctttccctcaccgcactcctatgtatattttgccaatatggcactgtcagtgtttggtgtggtatccctgctgtaaatcaagctaatccataggcatcacttcatgtgctgctctttatttatttactgaaatggagttgaaaatatttgttgaggttaaggaaaaactatgttctttgttgcactttaaacattctaaatattttggattagagaaaagaaaagggagcttatactaagtttttattttcctgaaaataatccataacttaatgttctatgtactgaaggagtttgggtgttcacaaatacacatatttatcaaaattcaatgaatgaatacttaacatttgtgcatttcattgtatgtaaatgtaatataaagtggaagcaaatgttgaactataattaatcatatgcatgcaaaagtatttaaggagaatttttctgtgtctgaaaatctctttgaaatgtaccaaaatcagatggattaaacaatggattgaaggatggttagattaatagatatgtgataaaagaagcacaatagaatagtcatgggagaatccaggtagtgggtacatcggattttactctacagttctttcaactttgctgcataattgaaaattttataataggatatagggtaaaataatctgcaattaaatatgacaattttcatactgttcctgctttctggaaagtttttttctaaactaaatgtacaattttacataatgaattaatgaaatggtaaattattataattttcagattctgctgtaggtttaattttaaaataatcttttattttaaaacaaccaattatgatttggagatgtaattatgggatttttaaatttttctgtattgtcccttttgtaccttattttcttcctctgtcctatacaatgatcaccccttattctcaaggcatacattccaagacccctagtggatgccagaaaccacagatagcaccaaaccctatatgtattatgttttcctatctgatgatgtaagtgactaatggactggtagtgtatacagagtggacatgctggacaaagtgatgattcaaatcccaggcaggacagaacagaacagcatgaaatttataactagttggcacaacatgcaatttataactatattttcacacaaccactctatctcaaataatattccctggtctctttaagttttacatcttttaagctcctatatgtagtttatgaattaattttaactggttattgttttactctacactttttaaggtgaagccatttaggattttaatgttttaatcatacatagtttttaaaataattggcatattgatataatgaaaagttctgtttttctctcatggactatttcttccatacatttagaaacttctattttacagttataaataggaggttgtagaactattaaaagtaacttaattgtaaatgcagatgctcctcaacttgcaatagggttatatcctgataatcataagttgaaaatatcattaagtcaaaaattttaagatagtattatatcaaaacaccacttacgttacaatatcagatgtctttgaagcacaagtccttctctctgtagataatacttagggaagatcatggatttcatttctcctcgttttctaacatttctctttcctatcagtctcctttgcatccagatgaagtcttatcaaaaagaatttccctcaaacttgtccatatcattacaatttagtagaccccaagtcagtcaattcaactaatattcactaaatgtctatttggctggcttcttcctgggaatctggacacaaataagacattatccctgctctaaaggaagtctcctgctcctataaaaggctaatgtggcaaaaagcagacactgacaaacattaagtggaggaatgttccatgttgatatactatccactttctgatgactcttttcgaaactattgttaggttgataaatatattcttggatatttattattaagtagctgaaataaaaatgattccttcttttttttttttttagaaaatagggtagggctcagcatgtgaattttgtttttaaatcattttaattttactttttatgggtggcagcatagtatggtagaatgagcaaaatgagtttaaaatcagacagattctgtcttctaatcttattaattcagtgatctagatctcagcaacttatttaaatctcccatgtctctcttttttcggctataaggcatgggtaatatagctatatgtgtgagaattaaaattttagtagaataatgagtaaaagtttcgagtccatatggtaggaacccagtaagtagtgagcactcttattattgttgcaatgatgatgatggtgataatgatgatgatttccatttgagttgcttgagaatcacaccctgagacaaagattctcctataagtaatttatgtgagaggtaatctcaaggaacactgataggggagtgaaaaagtagggcagagaaggaaaaaagccaataaggaaggcaactggagcttaatgatgctgtggcattctgagagtcaagtgtacagaatttcccactagagataagggagctggagtatttatccgtcaactcctggcagtcattagttgagggctactctgtgggggtattaattccttggcatttacagccttccacttgcataggcagagtggtgtttggcaggcagagaagctttcaggcaatgaaatacaagtgctaacagttggaagtcagctcggcctgcctgaaatggtaagagctgagggcatatgggtggagcactaatagtatctgtccagatgatgatgatgacgatgagaccacttgatgaagatgggaacactatattcactctctgagagatgaaatgtaagtgtagctgattaaatgtagggagaagcctgtctaggaaaaaagacactgtggtctctgcccactcatacacacaatttaccctacaggtttgagattattcttgcccaggccaatgaatcattttattgggcacagagttctatgcaggtatcctgtctggtacctgggtgggttttgggtattgttggctgctccttggatctgggagtccagttttcattcctctgaactcacttcctaaagctgtgtgcatttagctagcagccttggtctcaggtgatctagtcattacagcctacaggatcagattcagctgtaacccaaaggtcatgagcagaaggaacagctccaccagtcccttgcattgtttgaggagattttttaccatcttccagtttaattatgagatgtggcttctgggcaagaaagcaagtgagatctactttctgcattttgttttgttgataattgaatcatagtaattaagtaatcatgccgggtgtaagcaataacttttatgaacattaagatagtgcatttcataacatctaaatgctttgtttgttaaagttcacttttgagaaattgcaatcagtgttgggaaaacactattaatttgaaggtgtggaagagagagataaggtacctcatttagaattgtatatgtcaggtaactattatctctgggaagcagtgaaggtgtcttatttaataaatctcagaatctatacaagccataaaccagtatttacatatatgggtatagagatatctgtatacatgtgcacatatattattttagccatgttctagacacttaacaaagatgggattgcattgactggccgcttgtagtgtaaaagagaaaatgtaaactgtaatcagtgtttcatttaaatttataaatgcactgtattttttattttgatgaatgggaacaaattattaaggtaataatacattagctataactatgtttaaataagtccagggaatcaggtctccctattaattttcaaagtgtaagatgctatccatccacattgtagatattaggaactgttgaaactctatgtaaatatagtaaaaatttgttgcaaatggaaatatgaagtaattgctagaactttttttttgtattgatagcattaagtattaaggctagctgttgcagtagctataacctagttatagcaatatgcatgtggttgactggtatgtgctttgccacaaaatagaagaaagaatcctccaggagaaatattttgcaaatctgcttttcaacagtaattagaagatgggtgatattttgctactgttcataagtgtttctcttaatattttgactggttcaaaggaaagaagggccaatatccatcatatattgttagggaacatgttttaggattgcagagtgagaaaatagagactacatcttgctatccacattttccacttttctctcagacagatcctgattgtcatccctgtttagcctcctgcctttttactcaactcttccccctacctggatggcttttccttcttttgatcccaactttcccttcctttgatctcagctaaactccttcagttagcctacacttccatcttttattctctcaacttttcttttccatagggtcataattatactgcacataacttgggtatcctctaatcattacaaataatagccattgttcctagcaaaaatgtgtgtttatggcagcaattacattttatgtatctttggttagtccctgcacagtgttagcttatagtaggtgctcacccaatatctgtattttctcttttttttttcaagatctaaatacaattatatttttaaacgttgggtccaggctttacataaaaatatcatcctactttgccccctaagtttctaaaatatcacgtacttttcccccaacatctgcagccatccagaaatttgttggaaacttttttgcattattttaattcctaatccctgcctctttgggctcagtgacaaacaatcaaaaccaccaaaaatgtggttcactcgaagtcagatgagagagcctggctcaattaatcttataggatgtaagcagtgctgcatcaactggctccatgcaggagggacacgtgaaggatctcatcaaccagttatctatataatcctcatgataaatgtgcatgcatggcagaaactgaatcaggtccccataaacaaagtccatcatacagatcacatactcccagatctttgtttctgatctgatctatctcttccagggtcataaatcccttcaggcagatgttgtataaggcttattctttgagctgttgtattttgcttcagtcaactgagctgcaaatcgagtctggctaggtgttggatggtagagcaaaactggaactttttcctgatgtgacagcagtggctcctgatctggctgtctcctcgccagagctagcctggtgggactgagatacgtgaagcagagagatgtcatccgaggagtggaattatcagactgcactgtaattgcttgttgaatcagttatctgttattgcttaacaaaccactccaaaacttggtggcttaaaacaacttactatttcccatgatcctgtagcttggttgggctcagctgggagattctcctcgattgtgtacctgaggtcactcatacagttgcattcagctgagaacttaagaggggctggaatttccaaaatggcttctctttttccagcgtctcctctgtatggctctaatcatcctgcagtctcgtgtggacttggcatcaccatgctgggctccaagatgggggagtgaaagtaccagtcctcctgagggatagagtagtaatcccagatattacttccactgcatttggttgctcaaagcaaatcaaaaggccaactcagaattaaagtgatggtaaaatagactacacctcttgataagaggagaggcaaagccacgtcgcaaaggggcttgtgtaaaaaattggaggaattattggggccatatttggagacttggccccttcacattttgtatctgactttctcataagacttttatttcttcagagcaagggctatgccttcttcacgttttcagaatcagagtatgaaaaatatttgctgtttcttgagtaaatgattactccatgatagttttccctctaccccaactgccaattataaactcagatttacattcagaatactggtgtgaagcatttctactatatctttttttttcaatcattttcaccttttgcatttatcttataaatctaacactataaaatacattatctggccgggcgcggtggctcacgcctgtaatcccagcactttgggaggctgaggcgggcggatcacgaggtcaggagatcgagaccatcccggctaaaacggtgaaaccccgtctctactaaaaatacaaaaaattagccgggcgtagtggcgggcgcctgttgtcccagctacttgggaggctgaggcgggagaatggcgtgaacccgggaggcggagcttgcagtgagccgagatcccgccactgcactccagcctgggcgacagagtgagactccgtctcaaaaaaaaaaaaaaaaaaaaaatacattatcttagttttttttttttagattagaatgctggcaattcactgggaagtgatccctggaagtattaaatgaacagaggagtgggagaagtaaaaaagggaatggatgaggctaaaaaaagggtgacaagcaaattaacctggagcaactggggttgtttctactggggaactctgcacgtgcctcggagctatcccacctgaagggtgagagcactggaggacatgaatttcccagaagttatggtgctccatgattacaggcaaagcaagcccactctagtggccagagagagccctcaggcaaagagacacatgttctagaagtcataccaacagcactgaatggtccaagtcatggagatctgggcagtgcaccagcaatgactgccatgcacaccattctcgtctgagacattatcagagaacaaaccacactcaatttattggtggtatcaagtatctaatgagtttataggctgggctagaatctatatttggggggagaggaggaattacttaagaaggtagtttcttcatatgttctttgacccctttaactgttaatatcatattgtcctaacaaaataatgaaatagaaaaaagtagacctaagaataaatactgtatatactagttttcttttaaattaaaattattaatgtgttttgtaaactgttcttatcacctgttttatatgtaaataagtaatatttttacatcaagcatttttaattgtttattgccttgctgtaaaattgattgttatgattattttagtaatttttatgtgatttcttttaaatcacatagggataattatgcttggcagattacttctacttttttttttcagatgttttcaaggcagagtcagaattaataaattttagccctctgcccaatccatgataagaaggtaagatttagtcattgattcactcagcatttaccaggtatttatcttatgtcagtcactgtgctaggtgctagagatgcaaaaaggaatacaatgtgatctttgcccttgaaaaactcaaatcttagagtcattcaaatatcactgtggtgaaatctcttaatttatcaccattgttagtaatgcatagtattactgacacattgataaccattttcatatcaatcacacctttttataaccataaccattttcatatgaattacaccttttttttttttttaagatggagtcttgctctgtcacccaggctggagtgcagtggtgccatcttggctcactgcaacctccacctcccaggttcaagcaattcttctgcctcctgagtagctgggattacaggcgggtgccaccatgtccagctaatttttgtatttttagtatagacggggtttcaccatgttggccagtctggtctggaactcctgacctcaggtgatccgcctgcctcggcttcccaaagtgttgggattacaggtgtgagccactgcacccagcccaattacacctttaagcccatgtagtcaatcattcagctccacctctaatttaatggccttcctttccctgtcccttccttcccttccctgtctcttccttcactttccttcccttctctttctgctatagactgaatgtttgtgtccctctgaaaatttttatgttgaaatcctaataccctatgtgattgtattaggaggtggggcctttggaagataattaggtcatttggagacctccctccctcttcagccatgcgaggtcacagtgagaagagaagacataagtctgtgaaccagaaagcagtctctcaccagacaccaaatctgccagtgccttgaacttagacgttcctaccaccagaactgtgagaaataaatttccccctcctactaaatagttttagctaaaaggagtaccaagaaaagccctgtctcctatttggaaagaaacataagggctttggactctaaattcacaaaagcagcatttatagtttacatctattgttgcacatcattgtaactccagtgcctggaaaagtatctgatcatagtcagtattcaatggccttaggtggaaactgaaagcaaggaggcatagtagagtgtgattagaggtgttgactggagatttgcatgttttatcagtagcagtttttttttttttttgaggcctaatgatgctctgcttcctcatgaatttcattccaaatgaagacagtaactaattgcattattttttgaactgcttatatttgctgttaccctttcttttatgcagaagatattcaagttggagagggaaattatgatttttttttcctttttcaatgaatgtaactgttaataggtttggatgagtaacttctgtgatataaggtctccgtacaagcagttatcatgctctgtcagtctttctatgcaattttatcatgtagattgttttgggaaacatgaaaattaagatttaatttgtcctaggaattggatccaaaatgtaatggaattggttccttaatgcagtgcatagttgtagagtatagtgtaaattaaatcaacttgtgcttcaataatctctttattagttttcaaatattgatttaaataatgatattaaattgtgtatagttgaaaagatggcattgctttcactgcaatagatgaatgtcatgaaaatgttcttctcttgtaatggaatcagatgtagaacatgataaagaacagttctcttcacacctcataatttctgacatagtaagttatgttgaggaaaataggcacattatattgacaatatatttttgtttacaaatatgccaggtggcctggtgtacagattgattgagggtgatcactactgcccatcacaactattaccttttgcaaagatggccgaagtggaagggaaaacttccctgcacaacttttgtggtggattactgttgagatatagctatgcattggatgttttggaaaaggaatatataagaatagacctttgtatttattgaggaaaattaaaattataaaagataaaaaggcaacttaatattctctcatttaaattttaattaactttcaattttgaatggtgttttcctgagctgttatccagtttctgctctaaagttggctgtaattttataacattcttttgatgactgtatgtgcatgaatatgtctgtagttattttgaaggtaaaactctacttatttcacttttttgagtgaagtattaaattgttttcaagatagcagtgactgaatattgcacttaatacaaatgtttaatttctttaatcctttttacagataaaagtatatgctttttatccttttccttaaaatgacaaaggcttctcctcagggagatcagaaagcataatgactggcatgctgaacctggtatctgaacatttgttttttattctttatttcatgtgaccttggaataattcagtggctcctagattttctcaaaaatgactcaatttttcattcatttcatttaaatgaccctttgagttatctcgtatgctacctgtttttatctttataatacagtaaaatttaaactattcatatctctatgtgggggtgggggtgggggcagataagggtcatagagaaggcacctctttctcagaaaagtagcaaatgaccaccctccatcccaaaatagatttagctacaagaagagtaaagtgcacatggaagaacaaaaaagccttttggtgtacaaggatttcagactttgttgggcttcagcatcagtagagagtcttattaaaaacactgtcatacatcacttaaagacaaggatatgttctgaaaaaaacagatcattaggcaattatgttgttgtgtgaacatcatagagtgaaccgacaaaagcctagatgggatagcctactatgtacctaggctatatggtatagcctgctgctcctaggctacaaacttgtacagcatgttactgtagtgaatactgtaggcaattgtaacaaaatggtaagtattgtgtgtctaagcatatctaaacatagaaaaggtacagtaaaaatttgacacaaaagattaagaaatggtaattgtgtatagggcacttaccatgaatggagcttgcaggactgaaagttgctttggatgagtcagtgagttagtggtgagtgaatgtgaaggactaggacattgctgtatactactgtagacttttataaacacagtgaacttaggctacgttaaatgtattaaaaatattttttctttccccaataataaattaactatagcttattgtaacttttttatgttatatacttttaattatttttaacttttttactattttgtaataatacttagattaaaacacaaatacattgtacagttgtacaaaatttttttctttatatccttattttataagcttttttctatattaaaatttctttttttttacttaatttttttttgttaaaaactaatacagaaacactcacactagtccaggcatacacaggaccagggtcatcaatatcactgtcttccacctccacatcttttcccagtggaatgtcttcagggccaatacatgcatggaactgtcatctcctatgataatagtgtcttcttctggaatacctcctaaaggacctgcctgaggctgttttctagttaacttttttttttttttttttttagtaagtagaagaattatactctgaaacagcaatcaatagtatggtagatacagaaagcagtaacatagtctttcattatcaattattatgtactgtaaataattgtatgtactatacttttgtatgactggcagcacagtaggtttgtttacatcagtatcattcattgtgctatgatgtcatgatggctatggcatttctatgcaatgggaacttttcagctccactataatcttatgggatcaccttgtatatgcagtccatcaatgatcaaaatgttatgtagtgcatgactgcacctactccaaaactacagaagtggaatttagagtcatgggaagctggataatgaccatcaaagttggtcttacatgaggtaggacctggtccaatttgaagtaagaaatcagggaactttccttcaacacttatttccttccatggtctaagacatttcaaaattctgagcatggttttccatttatcacagagtttaagttactattcagtgttgaaattcctggccctcaatggcattatgaatcagctgttcatagaactcaactttcttgaatgggccatttcccaggtcttctacagctgttttgctcatttttaatcccttcatttgccagcttaatatttgctagctgctgttattggggaattcagtttttcccccatgtccctatcttttgccagtttttctcttcattcctcaaaatcagtagttctcctttctcaaaggttgcctatgaatcatccatgatttgtatatcaccctttgggaaacacgaatattttcagaaccctcatttctctgtcgttaaatgaggtcaataatgactgctgacgtttcctttgactctgaagggcgtggtcaggctagatgagaaaattcttacagaatgtggtgtgctgtgctgctgtcgccactttgctgggagactgaagctcagacagctaagcgatttgccagggctgtgcaacccatctgtggtgggaattccagaattccaacctggagaatctgacttactcttttggagaacattatatttgataaactggaatcattgttttgagtgctcccatggctctgtaggccaaaacagtagaacttatgacagtagtttggtcttcaggaactccacttaaccccaaactaccctccagttttcagagagcactggggaaaagggagggatgagtgtgtattgaattatctgaattctgccacttatgcctaagagatatgtatgagagaatctttacattttgtacacattattctaaaattccttttagtccttaaacaactctcagggggaaaatagtacagaattaaaataaaagttcttaacatttgtccctgaatatatttttagaaaaagtatacttgaaatctgatcacctataaggaaagatttatcaggagagtttaaatttttatatttactcatattaaatgcatgtgtgttttgagaccaaggttttttgtttgttttaatattttggggagacatacttccttcaaatatataggttagaggtagggggtagggatggttagtggtataaaaaaaaacagaaagaatgaataagacatactgtttgatagtacagcaaggtgactgtagtcaacaatgacttaattgtatattttaaaaaactacaagagtgtaattgggttagggtttgtaacacaaagaataaatgcttgaggggagggataccccattctccatgatgtgattattttacattgcatatgcccgtatcaaaacatctcatgtactccacaaacatatacactatgtacccccaaaaacttaaagaatatataagtttaaattagaattcccccaaattctagtagtagaatatattcttttaaaattctagtagaatttgggagaattctaatttaaaccaattctggtgttcctgagttatgtgagctcctccaagttccactgttttgtcattgccaactcagggagtcaaatatgtacttatttagcattttctgagccaggtactggctctgagaggtacatactttcatttaattcttcaagagaattaaaagcaaacggagcccatatgttatagacaaggaaactgaggttctgagatgttgagtagcttactcaaggttgacctgagactctaaattaggttcatcctccttgaagacacctatattccttttgttctcataaaatagcacatccagccagcattccatcccagatattggcactaaggagaggcgtgggaaagggcatggacactttctgttaggtacatgggggacgttgtgctctagcttatacatgactgtaaaggcgcaaatgaaaactcttcctttattagtacattttcttttgcatggttatctgggatgagtatgtggtgaggtggggctgtgggaggaagctgctgcaattagttttgcctcaggtagaatgctgacatcagttgtaatgagattaaaatcttctactcagctgttgcttgaaatattctattgtgttctcatccaactattttaactaattgaagtgacttaaccatataattattttcaaatgtttacaattacttttagataaatataaatgaatgtttgcctgcatatgaacaacaaaaggaataatctggtaccttcacccaaatagtcaaaccctctaagatattggtagaaacatcagagtgtatcagtgaaggtcaaaggacacaaataggcatttttaaatactaaaatgaaatattactttcagttccaccaaaatggagtagcctcattccttccgggttctctcccttataactaaaaatttctagatacagtgctacgaagatggcaaggaagtctctcaaagatcaaaagaagagggtgaactgctaggaatttttggaacttgaactacaaagcagtgagttccttgaatttttgtgttatctgtcatatatcctgagctaggtgctacagaagcctccaaactgccagaactgccagaaagtacagataaagaagctccaagaaagtcttgttttctttaggcaaaggaccaggtgaagggtggctttacaccagaaaatttttggcagtatctgccaaacaccactggaaaactcacatcttactccctccatgatttcagtggtgctaaacagaatttgatcccgtcattcccatacattgatactgttagacttgatgagttacatgggtatattgttattttctagagcagctgctaggaaaactatccaaagcaatatacttttgaaaagataaagaaatcaagatagaaatttttaatatgatcaagtcacccaaaggaaagtaagagaaacagaggaaacaaagagaaaacaagtaataaaatgacagtcttaagccctagtatgttaataaacccaattttattactttaaatttaaatgatctatggaaatgcaagggacccaggatagtttaaacagttttgaaatgaaagaaccaagtttgaatacttagattttctgattttaaaactgtaaaactatggtaatgaagacaacatggggctggcctaaggataaacagatagattgatggaatagaattaagagtccagaaataaagccttccattgatgtccaattgatttgcaaccagagtgccaagacaattcaatgggagaaagaatagtgtttttgacaaatggtactgggttaactggatatccacatgcaaaagaatgaagttagatcccttccttacaccatatataaaaattaactccgaatggatcatagatctaagtggaagaactaaagctataaaactctcagaagaaagcataggtgtaaaattcatgaccttgcgcaatgaattcttagatatgataccaaaagtacaagcactgacaacaaaaagaaagatacatacactggactttatctaaattgaaacttttgtgtttcaaatcacaccacaaagaaagtaaaatacaggtcacaaaatgggagaaaatatttgtaaagcatacatctgataagaaacttgtatccaaaatacataaagtactcatatacctcattaattaaaagacagataacacaattttggattaggcaagggttctgaatagatatttctccatataagttattcaaattgctaataagcacatgaaaagatgctgaacatcattagctctcagggaaatgtaaatcaaaaccacaatgagaagccactttcattcagtaggatagctattaccaaaaaagacagataataagaattgttgaccaagataaggagaaattagaacacttacccattgctggtgggattgtaagatggtgcagtcactgtgaaaaatggtatagcagttcatcaaattgttaaacatagaattactatattagctggcaattctactcataggtatatacccaagagattaaaaaaatttacataaaaacttgcacattaattttcataccagtgttattcataatagccccaaaatggaacaacttaaatgtccatcatctcatgaatggataaacaaaatatatccataaaatggaaaattgttcatgcttaaaaaggaatcaagtactgatacaagacaaatgaactttggaaaacttacgctgaatgaaaaaaaagctagtcataaaagactacatattgtatgattccatttatatgaaatgtctagaataggcaaatctgtagaggccgtaagcagattactgattgttgggggaaatagggagtgaatacaaatggcatgagtttctttggcggatgaagaaaatgttcagaaattgattgtggtgatggttgaaagagtctatgaacatacaaaaaccatttaatcgtgtatttttaaagggcctggtatgtgaatcaataaagctaaaaatgtaaatggtctaaataaactaattaaaagacagattttgacataatagataaaaaacatgacccaaccatatgctgtctataaaaaatttgcttcaaatacaacaatataggtaggtagaaagtaaaagcatggaaaaatatataccatgtaaacatgaatttaagaaaaaaattgttatattcttaccgataaacttcagaggagagaaacattattagagctaaagagagacattgtataattataaaaagaacaatttatcaggaaaacataactattgcaaatgtgtgcacatcaaataatagtgcctggaaatatgtgaagcaaaatgaaacattacatctaaattttcttaaattctttaaaccttactccacgtataatagtctttaattatggcataaactaaaagatttatgtctatactaagtttcattcctgaaagagctgcttctgtctttttatcctcaaaatacaatactgtattaggtattgaagtgtttgtgtatgtgtatgtgtgtatttataccatatagacaaggtctatgattctgtaatcatagaacttacagtgatgtgatccttttcaagcttcatattataacacacacacagacacaaagattcacaaatgtactgaatcgatttaattccatgagttgtaacgttcttgataccatatttgttctaaagcagcatttcttagtaattaaaatgaatgagaagatctctacctaaagagatagtatgaactttaaaagcagaagcagagttcagtatttatatttggtagcaataaactacctgttagaaatatttatcaagtgaagatataattgcctgctttgtctgtgaacctcataagtacaaaaattgtgttctttgaatttacactttttaagggatgtatgttaaacattttagcagtgtatttttttaaattaaaatatatgaatttaatttacacaaataatttattttacataaaaacattctagctagcatctagcagttttaataccttatacattttaatcatatctgctagaacaagtaatctctagagtggtcagctatggaagaggataaagttagtagacctactaactttatagctcatatatattttggttatatactcgaattcctattactcgatgcttcaagcattatcttttaacctctgtatacaaaattagaatgtcagcacgtttacacttttctacttgttctccctctactttctgtttttataacttactgatactaaaatgttcaaagcttatagtatttttatgttctgtaactataattctcacacttttttctttagttatatacataaatcattttagggctgacctccaaatttttacaatagactctccattctataagttgactggaataatttctaacaacatgaatcatgcatgacttgtacataccctttgggaaataccaggattctcagaggttttacttgtgtcattaaatggagactgtaatggctgctaccatttctcttctctgtctctccggtgtgaaacagggctcaggggtacacataaggctgcaatctggtcctttttcttttctctatctattcacatttctctttgttttgacctcctgaatgtgaaaatgtttaatagcatgtatatttacatatttaagtattcaagctctactgcttagttcttaatagtatcttacctgtgcattttcaccagccaaagattttgagaggacaaaagaggggacaagaacttgctatccgttttaaagaattttctatagagaccttttaaaagtaagatgattaggatttcattaaaaagaattttaaatatgttaaaagcatgagtttttgcagctgctaggcagaaagacttgcttgctaaccacactttgtttcttgggaatgaatgactgtacttaatgtacacacacacacacacacacacacacacacaggtgcacgcatgtgtgtatacatgcccggatatacaggaactaaagataggataaaaaactgacctctagaatattcagatacagacatcattctgtggctgcctcaccaaatcatatgtggttggatataagaaagtacagcctatttctgggatttacagagataagaaaagggaaaaataggaaattttaaaatgtcacaactcattttattaatgattattactcagctttattattttagatagtaatgcatttcatgtttgaatatcacaaagaaaacttttctgaagtgattttcttgagaatattgttatacatgttttctgcatcctcccataggtctatgaacataagagtttatcatattttacctatcctgttaccactacctgtggacagtgttaattgatttctaggaaatgccgacacttattttagcactaatttcacagagtcatttatttccaaggtttatataacagtaaataaactaataaaatatattgaattttaatttgcctttttacctcttaatttctctcttatgaatagactttagaatttgaccttattaatatactaggaaactcagaaattagtttcatgaaataatgtttgatttattttcattcatttgataggacaggagctttaacagatggactgtcagatccaaataaagttttattgctttattgttatgtgcaataattaagatattgttcagatagattgacacctagactctgggagacttatggtgtggtggtgtctagatagaggtatatggagaattcgtaatactgcatgtgtaccaaagaacacctgtattgttataatttgtatgtaaattgtatatgaacaattgtttataatctaaagtaatattatttagaagcattttattacatttatttttagatttgtaacctgattagaagactaactttttcaaatttttctttttaaatgtcttgatttttgagaaattttagttcactcttaagttcccttaagattatggagtagaaaccactgtaagcttaggaaaatattttgaaataatttgtgaaatacctttttgtatcccaataatttctattgtcatgagcttttgaatgttaacaaaatgattttcatctctatgttaggtttaggtgcagggtatacaaatgttatatttttattttcagtacagtacaggattctacaggggttttcattgttcatttggggggtaaactttttatttccttttctaatagctaagaggtataaattttgatggtattattatctcagtttacatatgtttcacttgtaaatattgcattcatgaagaagaaacaccacaacaatttaaacacataaaatacttcatgtgagttacttgaaaatgacaaatcgaaatctgtcacgtaataggaaaactatgctttgaagcataatctctagtgctgcctcttctctattacagcttaaactgtactctgcatgtcatacataaagaatgaactttgcagtcagttaaaaaagctgaaacaattggtatgagaaacataccaagaaaatattctaatcataattccaagttgaggtcaaaaaaataaataaaccagaatatgagccataatctttttattttttttaactttaatagtccttagcaataatcaacaatttactgattcaacaggagacatgttactctactgccatctggttattctaaatagaacctatccctctggacgagcaaaaggcgtaatgattggatagacgttttggcagaaaaaagacttttttaatgtcttgggatttgggaggtaaaaccaatggccataattttgaaacatctgctcttttcatgatctcgtctacatggaaagagatttggaaacagaacatcctcaagcattatttttttgcagtgataaaaaaatttcattttgtctaaatatgtaagtagagtcaaattcacttcttagtaaaacctattataccattatataaacatgtagcttgcttcttcttttgaattcaacattatcttaagttggtatatttattgtttatacatctacctacaaccaaaaaggtgaggagttttacacaaaaagagtatagatataatttttaaaaattgttaagtaacacttgacagcaaaaggatgattgcacccacaacacatttgtcagggatagcaactgtagttggcaacaaaaatgaggcctatatgctccaaccctgggtcatctttctactgtttgaaattggtatccaactatctattggatgaatgtccttcttatggaaataagaagtgagattttcagtcaatcaccctagaccctaaattggttaaatttaaaaatgaatgggcctgctctcctccttcttgctgggtctcttggcttcctgggttgtttccatcctttctcattctttctttcccctcagagtcagggactctagaggaaaacctttctctggatttgttgcctgtcgtgttcttgccagtcctcttctggggatatgctagattctggttttgtgctcttttgccttgcttagtatgaacttatggaaatttggtctggtctgagctttctgagccctgtgtctgccccattcctcctggatctgatttaccttctatctcagcattggcataaaatgagtcaggacctgcagtcacacctttacttgggctagattagactgtagaccttaccattgcaggagtagggtggaattgacctcaattctgccctcacattccagccctcctaattgattttccaccagcatcttccccaggttgttccctcctcctctgcctgtatgactgactggcagcatgaagctagggtacgttagtccctggtagggggcaaagttcttgcacaagtttccaggaagccaagtccaaaagaaaaaaagacacaagagtatggtaatatgcaggggagaaagaacgtctccaaaagggaatggaatttatttttagatctagaaaaatgtcttcattattttaataagtaaaatatttaaacgttagcagttataagcaccactacatatctattagagtggctaagattgaaatatgctgacagtaccaaagtctggtgagagtgcagagaaactggacatcaaggagtttggcagttactctttttaaaaagaaaaaaaattagttaaactttttattttgagataattgttggttcatatgcagttgtaaggaacaatgagatcccatttatgcttgactcagtttcccccaatggtaacattttctgaattacagttcaatatcaattctataatttctatttggttctttttttataagttctatttcttttcaaataaattctagtttttcatttgtaaagctatatagtgcagtatcactgccaggttattaacattgacagtcaagctatgcaatcctatcaaattaccaacatcgtttttcccagaattagaaaaaacaatcctaaaattcatgtggaatcaaaaaagaacctgaatagtgaaagcaatcgtaagcaaaaaggataaagctggtggtgttacattacttgacttctaactatactacaaggtatagtacccaaaacagcatggtactggtataaaactagacacagatcaatggaacagaaagagaacccaaaaataaggctacatacctacaagtacctgatatttgataaagtcaacacagatatacactggggaatgaacatcttattcaataaatggtgctgggagaattggagaaccgtatgcagaagaatgaaactggacccctatcttgtactgtatataaaaattaactaaatatggaccaaagacttaaatgtaagaccaaaaccaataaaagtcccagaagaaaacctaggaaaaactctattggatattgtcctaagcatagacaaagagtttatgactaagtcctcagaaaaacaacaaaaacgaaaatagaaaaattagacttaattaaatgcaaaagcttctgcacagctaaagaaataattaacagagtaaaaagacaacatatagaatgggagaaaatatttgcaaacaatgcatctggacaaaggtctaatatccagaatctacaaagaactcaaataactcaacaagaaaaaaacaaataactctgttaaaaagtgggcaaaggacatgaacagacatatttcaaaagaagacatacaagcacccaacaaacatgaaaaaatgctcaacatcactaatcatcagggaaatgcaaattaaagccacaataccatttcacaacagtcagaatagctattaaaaagtcaaaagcaatacatgttggcaaggatgtagagaaaagaaaattcttatacactgtcggtgggaaggtaaattgtgcaacctctttagaaaactgtggagatttctcaaagaactaaaaatagaactatcatactatccatgtatcctacttctgggtatgtatccaaaggaaaataaatcattatatcaaaaagacccctgtgttcatatgcttattgcagcaccattcacaaaagcagagtcatggaatcaacctaaatgttgatcgaggaatgactggataaaaatatggcatatatataccatggaatactactctgccataaaaaagaatgaaatcatgtcttttgcagcaacatggatagaacaggagaccattatcctaactgaaatgactcagaaacagaaagtcaaaaaccacatgttctcacttacaggtgagagctaaacaatggacatacatggacatgcagagtggaataatagacattgtggactccaaatggtgggaagatgggaaggtgagaaggggccaagggataaaatactacctattgggtacaatgtgcactatttgggtgataggtacaacaaaagcccaggctttaccactacaccctatatccatgtaacacaactgaacttatactcctgaatctataaaaatgtaaaaaaaaaaatttttttttaaaacgtaacactttcatcaccacaaggattcctcttgttttccttttgtagccacattcatttccctcccacccctccctctctttaaaccttttgtcatttcaagaatgttatataaatagaaggatataatgtaaacctttgggattggcttttttcccctcagcatgaatctcggaaaattcctctagattgttgcatgtttcaatagttggttcttacaagtcctaaactattctaaaatcaaaatttgtcaacaataatatttttaaacagtgctaacgtaacaatgttattaaagttcttaaaaaatgttgaaattttcttctacataaaaagttaaacattttatatggtgtgttgattattctccatttactctcctcctactctaagtccccctgcctttctctggcttgctgcatgacccaaggggcttacttttatgcagtgtatcatctgggcccctcctcttccacatatccggctcaacagagtttagttccttcctttctttttacccctaagacctagaggttgagacagcattttcttattgttggaagatttgttgatgcctttaatcttcctgcatctttggacatggctcctttatttaattcctttcactcaaagttaaaagcctttgagtgtactatctgtttcctgccaggaccctgatacatttaacaaaaaatagataaattggatgacaaatgatatactgggcaaatatttgtaactcgtgtgataaatataggtttattttccataatatacaaagagttcctacaaaaggaaaataaaaaaccaaatgaccaaaagaaaaatgggcaaagggcatgaacaagcatgttacagaagacaaattccaaatggtcaataaacgtgaaaatatgcttctgcattagtattcagagaaattcgtatttctgtagtcctagctactgggaaggctgagtcaggaggatcacttgagcccaggagttctaggcttctgtgtgttatgatcatgcttataaatagccaatgcactccagcttggcagcataacaggtccccacctcaaaaaaaaaattaggattgctgagtcaaaagttatgtgtttgtctttttaactgattatgtgagattgctttaaaaagacattgcaacaatttacactaaagcaacaagatacatttttcaaccgtaagatgggtcagattcccctttaggactgaagcactctcccttctgctgagagtttggtcaggcaataattttcagctgattccttctccaagaattttcctcagagacagctgccttgcctaagattatggcctctccctgaggatggcctgccagcaattactcatgatgtaacatacgaaagtccaactgccttgcctgtaggttggaaaactctaaagggctattttccagggaacccaaaccacagcacagcattaacacttaccatgtgtaatccttaggaacataggaattctaatagtataaattgttgcaatgtctttttaaagcaatctcacataatcagttaaaaagacaaacacataaattttgactcagcgattctaatttttttttttgaggtggggtcctgttattttgcccaagctggagtgcagtgactatttataagcatgatcattgcacacagaagcctggaactcctgggctccagtgatccttttgcctcagactccctagtagctaggactacaggtgtgtgccaccacacctggctttagcaatcctaattgtcagaatatttgagaattaaaaattagaaagcattagtacataaatatatatatgtataaatgatgtgcactgctattttatttgttggaataactgaaaaaggcttaaatatccatcaatagatgaatgatctaccaatagaggatattgtatgttgggatattttgatagtattaaaaagaatgagctagatccatatttaatgggatgtggaggatgtccaaatgtcaatgatacagtgttgtataaaaataaaagaagaaaaacaagttatagatttatgttggcttgtgtgcatgcgtgtgccctgctatagcttattaaaggtcaacagatctcagtgactgttagaatgacgtgttttattgggctcactcttcagccagaacatgctagcatggctatacttgttatttatggtgatgaccattttgattggctgggtattttttctaattaggcagtgcctgtgctgtccttgttgttaattattttgatggttggctcctcctttaaagtgtattgtcagctgactgacaatttttgaaagcctgtttatgtagttggcttcagaagcagcaaggattcaataaaccacttttatattcagattatgccagatatttggatggaaaagggagtattcattccagatattatatctgtataacaaatataaacaagttagaattataatcaaaacttctaattctatctgttaagctctttgtagacactccctcttcattatgaataacataggtaaggagagagaaattatgcattatatagttaaacactggcaaaacattatttctcattctcctactattggcttctgggttaccagagcacatacttaggactgccaaattctgaagtttagaaaacactgtcataaggcataatgtatccattagaaatgcattaggaaaagagagaagtaacattttattagggcttttagctagttggtggagtaataagcatacttttgtgttacctttatatgatttatattacttttcttctagagaaaacagtggaatcaaagagtattttgatcagttttataaagaaatagatgactacttaagaaataaatatattcaggttagagtttgctcatttgtatttgatatgatctgacactgcagaaggccaaaggatctcattattgcccgggtctttacaagaaaggttccccaatgcatgacatggcaatttgtcgcctttatttagagggatttagacaaagcttgcagcatttagcattccgttcctttgacagtaccttttaacatccttcttattgttctatttgtgggtcaatgcaaagcattcatgaagattttgtggtttagggagcaagtgaggctgttgtctaatttgttgtaattgctcaacttactcaaatagtttaatttacctctgaatatgttcagcagcttagaagaaaggtgtttgttcaaacatgaaatctttataattagaaaaaaattattatatgggtttgtgttatgtaaaccttagtgaactttctcccaatctaatttaattaatctttaaataacattggtttagttcttttggcataggggcaaggaaatattatgctttgaaaatgtaggcttttctgagaagtaacatacatttttctacgtgagcgactttttccttaaatctctttctaaacagtcatttcaacttctgcctgagggaatggattagctgtatcattcctcactctcagattaaccccctccctgcaaactgctacagccccagtcagcattaaggttaccaaaccatgagggaggacacaaaatgttctttctctttccaactcaatctatctttgaagtgccaaggagagatattctggcagtacgtaaatctgaaattctgttttgcttcaaaaaaacaaaaatgaaattctcactcagccatgattctcttacaaccggcaatctttttctgtcctttgtctacctcagtgtcttggaggtgtctcattagtgggctggtatttctgacagaatgctttttaagagttacatttctagctaaatctatgctgcatttttagagacaaaatagcatacagggaaaatgaaaaataacaccagagtcttgaataatatcgttagctcaccttccatcagttaattgtatttcttctcttaaaaaaaactattaaaacttcaatttcacattatattgctttcacaaatacattggctaatagtatagatattgagccattactgaaaatgaatttttgtgggtagaatttgcaaccaggaagaatattaaaaaactgaatactttgtattcctgtgtgcctattcagtatcctccacaacccagcatcattctttggtgaagaaattgtttactatacttgggttagcaacatttaggtccccccaccttttttttttctctttcaatttttagggatgctgaaattaggtgtgagtgttgataatgactgtttctgcctctgcttatataatcaaagtaaaatggagttaggttaagttattttagagggagcttactatcttctgtgtggccaaatttatccaggagcttaaactttagatactttgggtcccgggactagcatagactgtgaagcgtagagctgtgaaagaatttggatcctaagggaaaaaagtttggaaaccaaccatagaaaatgcaagtgcaaaccacaaagaatagttaaaatgaaaaaaaaggggcagtgtaaagcatgggaggaactgagattcttttcctctgctgttggaagttctaccacatcagaaacatatttggtaatagaactaaagctaaatatatagctatcctctaactagcaattccatttctaagtctataaccaacagaaatgaatctatatgttcatcaacatgtgcaagaatgtgcatagctgcacttagtaatagtcccaaagtggaaacaacagtacaatagatgcattaattgtggtacactattacaaaaaatacagaaaaaaggatgagacaactgtacgtatatacaacggcatggattaatttcacaagctcaatgttgagtgaaagaaaccactggataccagtaagaacattctattgttcaatttgtgtaaacttcaaaagcaggttaaactgatctgtggtgttgtaagttaggatggtggttagcattattgttggagggtgagtagtaatgacaagaagaggaccttcttgagtgctggtggtctgtttcttgatctaggtgttggttacctgagtatgttcactttatgatttgtacaatttgctgtgtgtgtgtttactccaataagaaagattaaaaagaaagaaggaagaaaaatcagctatagaaatgaagaggattggcagtgtaaaagtgtcatttttttttccccatggtaaaagattaagaaagagatacatgattaaagccaatgaaaatttgggagtcaaagttttaaactctcttagcagccaaactaattgtttgaataaaatgcatgctagttatcacagtgtttcaaactttcctgatccttagaacactaaggaagatagtctcaaaaatatttactccctggtccttctgtgggagatttcagtttagtctgtttaagatggggctaggaatctttattttaaaaacacaacttagacaagaattagaataatggtcagttcaaaagagggaaacagaattatgtgatttttttttacagcagccaagaatgatgtagcctggtttattcctacttctccttcatctaccccaatcctcccacgtatctccaattccaatttgagcagtgattctgaaactttactttaagcacttgttaagaatgcagatatcttggccttactccaaggattttgaattggtaagtctgaggagaggcccaaatagggctatgcatttttcataagtaccttcgaagatgctcagattcagaagcagttggtctcagatgtacaccttgagaaagtcaggcctggagaaaaagaatgtactagacaaacagatatatttggcttagtttttttcctttcatgactgggctggttatctagcactggttatatttaagtccctaataaattttaaggtcataggagatgaggagtgtatcttatatccttcttaggagcaatttcacagcacctgtaattgtactgcttagccagtaggtatttttgaaagtcatgaagtccagatgattaaagttatttttagttttattataatcatggttggaaattaacctggaaagcactgagtttccctgtgtgtatatatatcacttgtaattaaaaagtaatctatttccccagtcattaaatgtttattgagtatctattatgtactggttttctgaaatatcattttgtccctgtcatttcatggtctctagttggagcatgcgtagcaaagaaaattcatgttccaaaatggcacaaggagggtcttaagcatttttaatattccacttatcagaattggaatatagataagtatttgcctgctcccagttctttgataggcattctattaaaatcaaaggcaaatgaattgtcagaaatagatttagcttacaatatagatccactagtccttgcaagttggagtcacgggctagttctacaattaagaaagaccaattattcaatctcttagaaacttagcttacctaataccttgtctttatgtattatgtaattgtttttattctaggagaaggtactttattagttcaagactgcccagatatacagtaatgaaaaagaagaaaaaggctatcatcactctaataaaatgattagttatgttcggtttggaagtgtttgctcaatatattttgtcatagacagcataggatcccagacctcttgacatttctttgccacctagattttatagtcctgctggtacgtgcaagcaccttaaagaagaggctaatactggggaacactaaggtatatatatttattatatcatctctatttttaaagtataggccaatcatatatggatttctctgtaaaatgaaatagtatgagagtatcatagagatcagttggtgttcatttttgaagaatcttgacattgaatttaaatatttacagcctggagcaattaggattctcaaatattgctgatgagaaagtaaattagtgtaaccactttggaaaactgacattagctactaaagctgaacatatacctatacctaccctatgaacagcagtgttactcctaggtgtatactcaagaaaaatatgtgaaatattcagcagaagactgcataagaatctcgatggcagcaagtactctaatctcaaccaatagtagaaaagataaataaattgaatgaaaatgaatagtctctaactacacttaatatggatgaatctcacagacataatattgagaaaatgaagttagatgttaaaaagtatattctttgtgattctgttattcaaaaatagacaaaactaatctcaggatagtggttaccattgggggtttgtattgtgactggaagttggcatgaggaaggattttgggggaatagtgattttctgggttttgatgctggttagaatggtgtgttcagcacatgaaaattcactgggctgtgtacttatgatcagtgctaatatataatactccaataaaatatttaaagatattttaacatattaaatattaaatattaaagatattttaataatataaaatatataaagatatgaattggaatcagtttccagtgtttatcagttaggcttgtttacatgcacctacttgagaatttgccagcctcagagaaaagtagagaatagtctaagtataaacaatatcatttagatgtcatgaaatagccttttttttcccttttgcatagtgtttagtgtgtgatatgaaggtgttgtagccaggtggaataacatcaggatttggtatcattagatcatatttgagttctagctctctccttaaaacactgtgaggtcttgggcccagtcacttaattttctgatttgaaaactgagtatagtaatacctaagactttataggtctatggaattatgtattattttatataatgtttgtttactagaatgcaaatctcatgggggcagtgatttctgtctgtttcattgattgtggtatgccaagttcctggatctgtgtctggcaagtaatcagcacttactatatatttaagtgaataaattactaaaacaaaaatatagaaagaactaaaatagaaaataaagtatctacgtacattttagctgctgctcttttaaactttattaaaagtcactggaaacctgagacttgttgagtttaaaatattatggataaagggtaggattaggccttagagaaaagatattattttttttttcagatatacttgtcaaaatggatgtttctttattcaggtgttccttctaggatgatagaatcctgggtcctagagagaatacttagtgctatactgccatctttttgaaagtattccatacctcacaacagagtagactgttgaaaaagtcacaaaacaactgtacttactgaaaaattagatctttacaccatatatccaaaaaatgtatagctgctggttaaacccatccaaagtccagctttgccttagttcactggtaggagccaagctaggacgggttccagaagaagagttccaaagtccagaggaatggcttgttccagttatgggatcccttatatcgaggctcagctgtgacttatctccctgaaaaggtagcaccaccttcttcagggttgactttttgagcacatgaagtagtagccttaaccacgtggagctgatcttccaagagggcctgatgctttcaaggtcccataaggcatagagataatcaagaacgacactgctgcctgtgagacagtgccgtttctccatggtggtcaggtgccaggtctgtgagcaggagacattcctgaggctgttttccctgtaccagctcaggctctgtatcttctttctgctctcgttgctccttgggctcagacctctgctacttgcctggacttccacttgaatttttccatcgtcttgaattgactcattcagagtgttacccagtcttgttctattgaaccttactctctcagctgcatctcaaatcaaaccatagcatttaccctgccattcattcattcattcattcattcatctaatatatgctaaggtctgtagggataattggcaataaatataagcagttatctgaggctctttgtcctggctgcagtgcctcctgcttaagtcctgcagagcccataacagtctaggtttttctgatgctcttttcacttgccccctagtattctggctaaggcacattaatgatgtacacaaaactgttttctcagtctcttgcattttgggagtgattgaaaaattacatatataaattataaaatatattattatgaaatatattataaaacatatgcaaaaacatacaaaatataatatatcacattttataaatattcacggccgggcgcggtggctcacgcctgtaatcccagcactttgggaggccggggcgggtggatcatgaggtcaggagatcgagaccatcctggctaacaaggtgaaaccccgtctctactaaaaatacaaaaaattagccgggcgcggtggcgggcgcctgtagtcccagctactggggaggctgaggcaggagaatggcgtgaacccgggaagcggagcttgcagtgagccgagattgcgccactgcagtccgcagtccggcctgggcgacagagcgagactctgtctcaaaaaaaaaaaaaaaaaaaaaaaaatattcacaaagtttttggtctctgcacccctttccacttttaaaaatgatagaaaactgcaaagagttttgtttattgtattatatatagcaatatttaccaaattggaaattaaactgataaaatttaaaatatttatttactaattaccttaatataataaacccattatattagtataaataacttatttttaatgaaaaataactgtgttttcccaatgaaaaaatttagtacaaagggtggcatcattttacagttttgcaaaacactttaatgtctggcttaataaaagacagttggattcttatatctgtttccatatttaatttgttgtgctatcacacatcccgtaacctctggaaaacaccactgtacactcttgagatatgaggatgaaaaagttaaatgatgtcttagtatttatatgaaaatggctttgacttgtgggctccctgaaatagtgtcaggaatgcccaggggtccctggaccacatgttagaaatgatgccagaaactcacaattttatttattccttgttacactgcattcgatcaattgaattttagtgagtattcattcaaagaatcttagtagtcctccttctaataagaaaatagtttattaatgttggcatatgtacattttataaataaaattttaatattcattattaatgtaggaaaaaattatagtgccctgttacttagagctttatttggatgaaggatgtattaaatgtaattttaaaaagaaaatgttctacacaggtcaatgacctttataataaacacattttattgcttaaatttagtgcagtaagattaccaagacaaatatttatctttctgtcgaacaatactaataatgctgcaattaattatagaacttatttgaagagagttgcatttatattaaaatacctgcctatatcatgggcacctaaatatatagttgtcttcattatcacattggagagcctaggttcctcatgttttgtaaaataatgattttttcacaggcacacgatcttttagatagcatgcatcaggaagaggtaccagcatgctagtttcttatttaagattccccagccccacgactggtatttatgaaagagaagaaaggatgtcattacttgttcctcaagatgacacagagaggtttatgctgcttgagcagaggcttcagaatgtgaagactcaggcccaggttttgatgtgatttgatggccagtagcaacagagctgccactcttcatggatgattaaagacaaagagagtgagatggcatgaaccacaaagccctgctgccacctgacagatttttcctccgattcaaggaagcccttatgagagcccctttatgtgagcctggttcccttgccagtctatttcaaatttttttaatctctgctactggattgaaagtgtaactgccactttcaatatgcttcagaactgctaatggcaaagttgcttttgggaaccagttgattaatttagacaatgcaaaatatggaggtcccaagtcaagaataagctaaacgactttgccttatttggatataattaaaaggcatggatccaacgtaaatgtgtcacttcccagtgacatctgcactttctgtttgcaaacactgttatataagggctctcagaggtcaagagtgcagaggccacccccttttaaaacttctggtatattataaaaatggagaaatgaaaaagcagtgttaaaaaggaattttattttcagggcttatattggaagaaataatgctttaaacacaaattataatgcaatagaacttgggtattctcaaagtaattacaggatttatttgaacctatctttagtaaagtttgttactcaaactttataaatatacctaatagtagtcatgagtttgaattgtatggtaaataccatgttcttttgatctagtcagaatattccagttatttgagtgaatagcctcatttggagataaatcttaaacttgagtttctttctgggtgtaattctgaaatgatagggtcttctgcttcatcttaaaggagtgacatcacttcatccaaaagcagatactatttaaggtgatggttttaaatctaaggccactggatggccaaatcattgaggatataatattaaaacaaagagagattttaaaattctaaaatgctatatgtgagtatcttataaatgaaatccagaaatatgccaacagttttttcataatatgctcaaccttgagaaaaaccctgtttaatatctaaacatacgtatcaataaataattttacattaagaattactttcctcttgtaaagcgtatatttcaaaaccataattattttaagacctaaaagggattataataacttttcatctaagctttataattgtggttttggaacttaggtaactttttggaactatataagagggactggatgtggtggctcacgcctgtgatcccagcgctttgaggggctgaggtgggagcgattgtttgaggctaggagtttgagaccagcctgggccacagagtgagaccctatctcaaaaaaataaaataaaaaattagccaggcatggtggtgtgtgtctgtagtcccagctactcaggaggctgagggaggacgatcacttgagcccagaaattcaaggttacagtaagctatgatggcaccactacactccagcctgggcgacagagcaagatcatttcttaaaaagaaaaggaaagagaagagaagagaagagaagagaagagaagagaagagaaaacaactatgtaagaaatatctgcttcaagttagaattcagaaaaaattcatgaaactagaaagaaaagtagaagaaatggatatcaattccctcaatgtaagatgaagacacttaggctaaatgactgaattgattcctccatcaagcttcttatagagctagatccagaacccaggatttctgaagtacaacctgttgttctttctagtctatgacttgccaccttcttacaattttacatagtcaggaaatggtatggaactttaaaggctcttccaagaggaaagagaattgtttgtatttaaaaatatatataatatatattatattttatattacacatatatcaatggcaggttttcttttcacaaattgagaaaaaatttagttcatgttcaaatacaacataaaaataataaatataagctattttaaatgcctttatttttatctattttttgatattacagtagtcaggtacaaggaagtttattattacaggcgatatactttcagtgaagagaaaattgtgtgtatgctttattttgtatattgtaggcagggatttttagtgtttcatttaagggagggattgataatccaggtatttttgactgcctctcagatattctttgttaaatgtcatttatttctttaagaatcctgttcagtcaaatatttacttgctttttaacaaataataactcagggcccttcattcctccttttacattattatagagtagaatttcaacaacagtgaacctaattacataagtctttgtttttatcaaagtttttagtgttttgtcagccaaaactctaaaatattacaaccaaatatcagatggatttagttacaagcagttagatttattttttaagtgtgaatgtattacttctgaataaaggaaagagctgatatcggggaaggtaaattcaccgaaacctaaggcagataattcactgtagatggataataatttacttttctatagctttgctattttacagggaggagcgtgtgactctggtttatgtgacttttcagctgtttcttctaagaattccttttttcttctctaaatcttcttaagcttaaatgttcttcccatgtttcttggaagtacttgcaaattttatggaatgcacttctttaaagctgctgctagctaaaagtcctaacccctacattttaccatttcattctattttaattcaggtatttgcccatattaaaaaacataacacattcatttttttttctgggaagcaactgtatccaattctttttttttttttttttttttttttgagacggagtctcgctctgtcgcccaggccggactgcggactgcagtggcgcaatctcggctcactgcaagctccgcttcccgggttcacgccattctcctgcctcagcctccccagtagctgggactacaggcgcccgccaccgcgcccggctaattttttgtatttttagtagagacggggtttcaccttgttagccaggatggtctcgatctcctgacctcatgatccacccgcctcggcctcccaaagtgctgggattacaggcgtgagccaccgcgcccggccaactgtatccaattcttaatacacactctttgacaagtgcaaatgacattttataatcagattgaaaataaatgtttaatacttgctttgtgtgcttttgagggaaaaaccgtttcgatatttgagtaatacattttttgttgattatcacattttgttcttaatagaaagttggtttttcttataaagatgtaatttgattctattaactttgtctttttaaataagttatattttaaaaacttgaaggaaaagcccatttttatgtattgcaatcattttgtatttcaaaatctactttgcatatctttgtatacttgaattaatataaaagcttgataaagagatgagaattaatacactcaacctgtgaggaataaagtagttgtattgttgatttaagcttgttgaatgtgatatctcaggatgctaaagaggcagaccagcaggtttcaggtgattaaagaaagtccctcatcttggaggaacttgaaggaacatgttgctatttaagtggaatctaatcagtaagaagaaaagcttggatgtaaaaagacggaatgtttcatgtcattatttacaaagcaactgaacaaaagcttagcaagataattaagtgccttgatgctaagtagaatttttcaaagcaggttgattagaggtcttcttcaagaaaaaaaaattaaacatctaagtacaaatagtctagttgaaaaggctaactcagttacatagatggagaccagtttgaaagaaaaatcacagtattgtatatggtggctgatgttcacagtgatgcttttaattgctgagcaaaatcccgatcatccctgggtagttatagcactaagagtattttactgtgttttaagtttttgaaaactgaaaatccgtacagacttaatatgcagtggcactgaatgtattattccattatcttggttactccatttttcaattggtctgaataaatagaatttgattctttttcccgttgcctgaaaaaaaaaaaatcaaaagtaaatattatcattctcaatataaaatgttatttgcaactgtcaagcaaaaattggatgtcatgtcttgtatctgcattttgtatttcaagacactcctggtgataacataaggagactggcatgcccaggattgtgctgtgtaaacaaatgctggcaaagccctggcttctcttaagcaggtggtcaggtcaaaacactgatggcagcattatagctaaaaatgaaaactaggaagtcgtgaccttaggacctacttttctaccaaagaaaggaagcttgaagttaacaagtttgtgccaaacacttcagtagacatatgttcttttttcagtgttcttttactgtgttaacattttaatgacctcaagtttacttagtaatgaatactttgggggcaaacatccagtagcagattgcttcatttattaccaatgaatttatttattcagtcagtcattgcagagctttatctctgaagaacacatttgaaaagctaaactgatcctctgctcacctggcagtccactgtgagaatataaaacgagtaactataataccaatctacctgtgggcagtttgcaaaggctgatgtcgtgagtgccatatatgagactctttttgaaatctaaaacaataacccagcccagacattttcagctaaagcatatgatctaaatgcttgaattaaaggaaaaacactttggattatagtccccattagtacttaaaacactcttggttttttcacttgtgctttgcttaagccaatgtgtctcaaccttagctgcatattagaattacctggagaactctaaaaaattctcatgttctagccacactccagaccaatcaaatcagaatctctgattgtagaacttgagcatctatattttgtaaatctctttacctgattccagcgtggagcgaaggttgacaaccactgatttaaccacttgcaatttcttcattcattgtattatttatttttcttggccttttaaaaaacacactgtagcatgacttccttaatttagaatcctgggatagagtttctattttaaaatatcccttttattggaattggactaaggagcattataaaaggccatcatttaggatttatattacttttacattatttaaatatataaaacttagtcactgtggtttgatttctgtggacactttgatggacagagtgcattttaatatgagcattagacatcttttatgctttatttcacattctcccagccgactcttcccatcatccattgctgttgcatcagctgaacagagatataacctgataactcctcaccttagctgtacctgaaactgtttcttcctcggaggtgtgttggctactgctcttgggagtcaggtagtccagtgcatccttatacctgattcagttcttggccaatatgggatgggagcaggtaggagcatgctcttctttctatgtctcaggcagacagttctgaagttattctacacatttcctgatagcatccccagtaagattaaacgtcagttgctcacgttagtcaccagcccaactatacacccttggattggctttcccccttcctgttttacatttacacttcctatcccattcaactctcattctagttttttgggaaccacttctctgaataaactatctgtgcacaagtcctcatctcaagctctgcttttttatttcatacaagctaagacagtatgaaagagaaaaatcatcataggcatgttttagtgcatgctcccttctctattgtgtttttaaaatcacgttatttttctacttaatacattcagtttatcatattatgataagggacactttactcacaaatctcgaatgctggaaaagagccctatccccatgttatctgttaccatgttatccccatgctttcgtctgctgcccttattatcctctgtgagttggttgccttaagatcctcctcctgatgtctcccagcagcgtgacctagattcttgatcagtgtccacaccgaacattcactccaaactgtgcagcaaacattttatagactcaagccacataataggtccataacatcagcataatattaaatggaatgggagagatttttgcagagagaaaaatggtgctaatgcagtgtgatacacttggtgtagtggaaaggcaagcactttacagttagggtcccagtgtagggtaattgtgtcttctgttgcccagaaaataaatacagttaaacatattaataaggaccacccagatatttttttcctccagcattgaaaccaattgccatttctttgttgagcatcagatgtttgaaacatatatatgtgaccattataatgacattgtttgccatgagatactcatataataagaggcacacaggaggaggcacagctcccaaatcacacttactctggggcatacacatcaagtgaaattgtggcaaaaatcctctgcactcttgatcttttctctccgtctgtcactttgtggctgagtgcatgtggttgagtgtgcagaagtactcatggatgatgcaactctcttgtctgagcgtatttccaggctcaggaactaaggacgtgtgactgtagcagatgactctcatgtcttgtgttggatttccttggcctctctctaacttgagaaacagctgcagtggacagttctgtgcaagctcagattcatctcaagctaacagcatttcatctccagcatgagcatgtcttttagcttcctgcccatggccttcttttatgttgctggagttcctaacccacagaccgttaggggccagaataatgaggatgttaatgcctcaaagaccaccatcaatcatcagggtccagaaccttgaataaactccccagcctctcatcatttaggtgggcaaccctgggaggcatctgtacttttctcagcaggtcccaatggattcaagccctagtttcccaaagaagtagcctcagtaatagatctgtatattggcctaatcttcttccctgtgtcattctcctcacaacttcagtctgcttcctgagatcatctcccaaataaacaactgatgtccaggttcttgcctcaggctctgatttcagaggaacactaatgaagagcgatgttaggtcagtaatgtaatctctctgagtcaatacttactcatctatgaaacaggaatattaagatctaccttagaaggttgttgaaaggattagatataatttatataatgcatttatccctatccatggtacatgactcactttaaacactgacaggtgtcttaagagatagacaaatataaatagaaacctaattctaacatgatttctatagagaagacgagaaagagacagagtgaacagacctgaggtgctacatgcatgaatacttgctactggtttccttttatcttcctgaggcagttaccataggcatgatcaatcctcctcagaaccagcctttgcccttgtgttacccggcatgagggtgccctactgttctgctcctccttcccctctctagcaaatgcctccaggaattagggatgcaatttcattttcttagttcactcaccttttaactatgcccattactattccattttattctaaccaatgaattatattctactttcattaagggctttcctatccaggaaactcaagtgggtccaaatttcccacaagcacctcatttacccagcagcgttttgtttagaaattagctcttctatacatagggcatgccgagataactgaagcttatttatttaagttatgcttactttagaaatacaaatattaaaatacaccaattttgtattaagctaaaatatagtaaatgtgggctgtgttttagttagggttgctataataaataccatcgactgggtagcttaaacaacaaacattaatttgtcacgattctggaggctgggtaacccaagatcaaggtgtgggccaattcagtttctggtgagggccctccccctagtttgcagatggccatcttctttttgtattcttgcatggcagagagaaaaagggctattcttcttcttcttataaagacatttcatcatgggggctccaatattatgactaaattacctcccaaaggccccacttccaaataccatcacatatagggcttcaacatttgaaatttggtggggggacacattcagtccacagcattgagtgacaaatctttaaaaattggtgcatctttttagccttcttttatataattcattgagcctaattaaaagtttttaaatttataatttagagttattatacctagcaatccagtgatacctagttgatgagaagttaaactagaaattattgtcagttctgtactagttacttattaaaggcttgttgaataaatcattgaatgatcgaatgaatgatgcatgattcttccctggggtttcttctaactctagaattgtatgattctatgattagcaaatcctttgggaacaaatcttctttcaacaaagttggtctaaggtcctccaggaaggtggaggtgccagtatccttagttgtggactgatgtaattacagctaaggatcatagtttagtttcttttgttggccttgctagagcagcccagttgtggctggggtaagggaacaatagctgagtcccgaagttgacatgctttagccagaatttttacataggcggaacagcgtaattggaaggggatctagcaagtttgtcttggagctgggcatacataaaaacatattgttttttacttagcacatgtgcttcttactggaggtgttaggatttatgaaaattatggagtgctaacatcttcctgatcacactgtgctaccaacataaccccatttccgaagagttaaaattaagccttttagaatcatatgtaaactatgagagtaggttcttactaagggtttctgaggatagcataagaggaatattcaggtgctttagtgcaatgacttgttttagatatagataattatataggtaatctttacagatgtataactatataatatataatgggatatattatatgtattttggctttacttcttcatttataagatatttattgtatatatttgctcaggtaactactgccaataatcaataagtgggacagatatggttttgtgacctcatgaagtgtacagaaaagattaaatatgtaaggtgttcctataccaaagatggaatcattttaaacctaccattgcaaagaaaaatagtttttaaacaaagctgtttttcaaatacaggatcttggtagattaaaagatttatgttgatattacaatattgttaaagaaaatgctgagttttaggtgagatattcaaggtgtgtagctttctatgtaatttccttaacttgaaccaactgttattaagaccttttgaggccaaccatttaaacaccactaggtaacacaaaaaacaatgatatctgtgacattgtatgtatcaaaaattaaatgttataaggacaaccagtgcactaagtaggatacacttgtgatggccttgtttgtgcttattttcttgttttgttttaattctttacattttggagaaaataggagaagattcatgggttggttaccaaaagggaaatgtgaattagtgaagtgagaaacaatatgtatattttcatcttgctaaataaatgtggtctcaagtcttgtgatgaagggcgatgagatactactaagtggctgtgtgtatgtgtgtgtgtgtatgtgtgtgtgtacaatatatctgttagctctaatgatgtgtttgcatattctttgaataaatgactcttttatattcttagaatgttctagataggttgatttaatcagtaacatctttccttaagtttcctaattctagggtgccatgtgaaaagatgcagaagaaaagttatgcttacacagatgacattcaggaatgaatactttctgctataacaataaaaaagtccagtactagtttcaatatcaaaagacgaagagaaatggttatttagaactctgtgcatagaataccaatctggctttctctgtagttaactgattctgaataaagatggtgatttgatcaaatttcaaacattttgaattcctcagaatacccttaattggcacagttttgttctttacaccctttgcttcactcttgctttacaaaagttagtgaataaatgaatgatccatttagtctcccaaagttttgatatactacttttgtcatatctagaatctcacatatattgaggtttattttagaggcttttgttctgtgtcactgtcctgggtccatatatcaactctggattcaaattattttagttactatagcctcataatatttggagaggctgataataccacattactcttctctttcagaaatttccaggattttgacataatatattttttttcagataaacgtagaaattatttcaagtttcaaaatgtattattttcttgtttagtgtattttataatttaatttagagaaactagattttttataatatcaggttttattattcactaacaacacaggttttctcatttctttgtgtctttttaatagcttttatagaactttaaaaattggctgcacacctttatatttgtttctaggtgattactggtgtctattgatattgtgattaaaatgtttgattcattagattttttaccttgatatatagaaatatcattaaatattgcatattcatgttctcataccttagctactttgaattctttttggttatacaattttttcagttaatattttttagttttcttgtgaactattatattgtctgcacttaattagagcttcgtctcattttcacaatttttcaatgaattaattattattgttatattggttagaattgagttgttttatatagcagcatatcactaaataggcattcttagttaagttcagacataaataaaaatgctttgacatttcgtcattaaaaaggtttaatctttttaagttccagggagaaatctttttcagattaagtagatttatttttatttctaggttatgcagaggagaaatgattgttttattaaaatgtataaacagaattattaatacatttatataacacatattaatatacacacattccttcaaatgatttaatttaaagaatttcattagtaaattttataatgttggactatccctgcatttaaaaaaaataaaccctacttgatcatgatacattaatcttttgatgtgttgctatatttttgcatgctgtttttaaaattaattttaaattgagatatagtttacatacaataaaattcacccttttagtatataattccatgaatgttgacaaatgaatacagtggtgttatcaatacccctttaagtgtgttgctttgatttgctaagatttatgattgtagcttctaattctgtaagggaaaaggaccatacttttctattttccaatgttatctgtctttttctggatctggtatcaggcttattttaactttataaaaggaattaagaagatttttatctatgtatatgtttaggaacagtaaataacgggatgatcatctgtttcttaatgattttatagaacctgcttcttcctaggagtaaatctttgaccatcctttcattttctcctcatggtttttccctctggtttttaaatcttcttgagctacttttgattatctctattttcctagaaaatcgttcatttaatttaaattttcagaattactggcaaaaagtttaacaattgtgtaccaatgtatgtttttatttacatttatcttgttctaatgacatctggttaagtgtattttcttctttaccttaataggtcttaaaaattgttttacctatatttttaaaggacagctttacttttataattagctactctttgtcttgctatttagttcttttctggctttgtagtttttctttttttctctgtctggtaatgtcttccacttacactgtatttctgatgtggctggagtgcagtggcgtgcgatctcagctcactgcaacttccgcctcctgggttcaagcacttccctgcctcagcctcccgagtagctgggattacagatggggtttcaccatcttggccagtcttgtcttgaactcatgaccttgtgatacacctgcctcggcctcccaaagtgctgagattacaggtgtgagccaccactcctggccaaggctatatattatctacgttacatgataaacattgtacgacatgagcatgtagcattttataaaaatattcattgacatcatctcacagcttttgatatgtttcttgtcattaatttccaagtaacttataatgctatttttagttgctttacaaaccaataattattagacatttaaaaacatttttgaatgattaaattattttagagaggggatacattcttgtttttatattaattttagtttagtcacattatctcagaaaaaaagtgtcctgtatgactttctgtttctgtatttgaaatcccaatttgaagatctttgtattctaacacatgatgtttaaattgtattatttttgtttgaaaataatgcatttcaggattcatggatttttctcttgttttatgtatatctaatgattaaatcaactttgtattaagtaaatcttataatcactcaattttttatacacttgaatgactaatttctgaaagagttgtgctaaaatcgctattcttttaaaatggtgaatttctccttttttctatctgttattgctttatcagtttttgaagcagtgttagcataacatctcaataagtgagcaatttactatataattatttggttataagttttgtcaaaacatctttcttggtttcattttatgctttttacattgaattctattacatttggtagcaatgttgccatttatacttgctttttgttatccttgtctgttatactattatattttccagttttaacgtttctgtagcatttagttacatatgtagctctagccattctgagagttgctatgttttaataacataatttaaaccatttatatttattataatgactgaaatgtttatacttattcatgacattatattgttggttttctctatactgttttcctctctttggctgtattagacgtggctagccagatgcctgattaagctgaaaatccaggtaaaatctattttaaattcagagagaaaagttctaaccccaaccagctggaaaatggtacatctgtgtgcagttcactaaatgctacatactgctgtatggcatgaattctgcagcactttataaaaatatgccgttctcatatacaaaggtgaacttactgacccttccatctgtgagacatgtgctttgagctgcttttgatatgttggtgaagtgttatattgagccatggcatacatttgtattatagcttcttggggttagaatttaaaactgtggatattagacagttttttctctctctagctctaaaaagaattatatttttaatatttaataatctatatcttttggtaactcttgagctattttgactacattaaggtggtcatacatatgttacccaaactggaatgcttttgatcatgaaaagtgacactgttaataattcatgctggataaacacatatgaactgggaccatctagggcaaaatggaatatagagctgtcctaaccttactagttagaggaaagagatcataggtataacataaatgaaaatttgtactgtcactcatttacccataaaaatacttactaggtaaggtggtaggcagaacattcagcctgggtttagaggtttgtggggcagtaagatttgaattaaagaagagattatgatgctgtggcatggcttaggtaggacacattcaaactcctagcctaccccgtacacttgagtagctgtcagggtgaaactgcaaacagataccttcagaaaagaacatacaaatccagatttatccattttgcatactattttactcatttgtctgttatttacttattgtggtcatgttactatttttcccgtatctgtatattttaataattatcttatattgaatgaccctgcttgcccagtttttctcttttctctactgtaagcaacataaaagaaaatatttcattttatttgtattttctgctcttaactataatattttgcgtatttagatgtgagaaaatgtaatactgtcaggtcatttcttaaagtatggccttgtgtgatcctaaaacattactgagatagtttaagtttcaggtaaatggtggatgattgttacaatcagtattactcaatatattaagtccacattaggtctcaaaatcttaggtctgcatttgattttagagacatacattatggtgtgagtcatttttctataaatcaggtaaaaaatagatacattttgatgttatacgaaactgtatttttctaccatagcagttactaaatatacaaatgatatccttcaagaaagaaatgataaaactgttttaaattcttttatgagtgtattttaattataatctacatataatgttaatagttttcttatttgattagaggaaaattttttgggctaaactttattttattttgaatagtttagtgccattgagcttctttctgtatgtattacaaatttaatacatttaatccattttctccctcattgctttctttcccaaaaggacacaaggctgttaacataattatttggtctggagatgtcagaggcttcgctcaaattattatatatcaactttatttgctctctcttattctgtatagttttctttttgtaaattacgtagtatagctagattggctccctgtaaatatatctcatagcacaagaaatttaaaatatttccagcaatgcctgttttaaaagcgatttcagctgcacctgtgcttaaatctggccacctctagttcagagcaatattcaaacaccaaaagccaatgatgaactggacattactaccccatgtctacaaaggaagaacattaacttaacatagtgtggtgtctagaagaaaatgtacagcctcataaagtttgaggagacgtttttatgcactttaagcttcagtgtaatacctttataagacaggttctgcagagaggggcaatattatcttctcaggctagctagtattacaacacactttcgctgtaatagtcaaacaaacctttattgaaagccaaccatataccaagcagtgttctgggaattctggaaaaatataaaaatatgaaataatttgagatcatgtaattatgtaatgagtgagaatacatttaagtgctacagtacttccaagaagggagagtttagtacttgatcaagaaatttagactgaatgtgaaggtgacaggaaatcattgggcagagaggagaaaagaagatatgctggatagagaggactgcagtggaaggacatggcaaataggaatgcagagggcatgactagacatgcatttgtgttcactagaaattacagttaatggatttggataggaagggtttatttggagttcctcgagaacaaaactaaaaaaatatatacacgatatggttaatagaaggcagtcatgaaggatttttgaatgagaaggttacatgaaactatctgtattttagaaagttaaatatgactatgccatctgtaagctagattggaagaagcagctcaaggatagtagttaacaacatagttgttaagttttaggaacttttgggcatttgatttggtccgctagaagaaaggaacattattgcaaagaggaaatgcatattccttagtgtctctgggtttgtttgtttgtttttctgagacacaatcttgttctgtctcccaggctgaagtgcagtggcgtgattacagctcactgcagccttgacctcctgggctcaagtgatcctcctgcctcagcctcccaagtagctgggaccacaggcgcaggccaccatgactggctaactttttaaaaaagatttttgtagcgacagggccttgccatgtttcccaggctagtctgggtattgtaagttctcactttggagattgattggttttattggtctgcatagggatcatttattagcagtagctacaggaggtccatctcaatgttattaggttacattttctgtactgtaagcaatataaaagaaaatatttcattttatttgtattttctgctcttaactataatattttacatatttagatgtgagaaaatgtaatgctgtcaggtcatttcttaaagtatggccttgtgtgatcctaaaacattactgagatagtttaagtttcaggtaaatggtggatgattgttacaatcagtattactcaatatattaagtctacattaggcctcaaaatcttaggtctgcatttgattttagacacatatattatgctgtgagtcatttttctataaatcaggtaaaatgtaggtacatcttgatgttatacgaaactgtatttttctaccatagcagttactaaatatacaaatgatatccttcaagaaagaaatgataaaacttttaaattcttttatgagtgtgtttttatcttaatctacatatactgttaatagttttcttattcgattagaggaaatttttttgggctaagtttcctataaaaggcagatgtttttaagagtacagattgtgtataataatgaaatgtatctgtgcaagtaacattctgatttgtactttaattgctgtttatatacagtgtgaattaagaataaaacagtgaggtgagggagggaagaaggaatgaggaatataattagcatactcagtagtttggaaatgtaactgttttaattaacagctttgtggtggcaaaacaaacgtgctttgggaaagctaagaataactaggattgtggcatcctccttgggaaaaagttgtttataatcttaatgttttatttccttttggctgacagacaaaagaaaacaaagtatatgaaatatttgtgtcagaagatatttatatgttcagttttaccaattttatgcattattaaaaagatatttacttattaattcaactaaatgccaagcatactacttctactaatattaacctttgtctttgtatccttccagaattgcatttatatatttataagaatatgtatatagagtctatttattcatatttttaaaaaagtgatcacattgaaatcatgttgttttgaaaattgtcttttacttaactagacattaagaatttagaattgtttacttgcatgaatgggtctgattgtcaggtgatttttcagttcaatatttgtccttccctttgtctaaaatggtcttgatttacatttcttagctctaggcatgactagtagatagggctagaaaacaggctttcagagactaagactctcaaacagataaataaatatactaaatgagacatggtaagtgctgttaaagacatgccaatgaagatagtaggagtacaaaggaggagaaactaactttgcctcagggagttgtaaggaactgcaaggaccttctgctgacttttcctctaccctcttcaacctggttcttcacctctgcagtttgttttctctgttttctcctgcctaatactcactcatctgtgatcttttcccttatattttctctcacttaattggcattggtccacttcttttaaatgaaaaaagaagatatttagaaattacaaggcatttatggtttattaaaatatggaaaatgctttttttagaataaaaactaatataacacttcctactcctttgtcataatcaaatagatacgttaaaattgtattaattttttaaaattttccctatctgcaaatatgtggtgtccatcacaatctaagtaagaccatctaaaagtaaaccttaatataacatattttttcatctcttctttaaaataaatacatatgcaatatattatttgttgtggttaagttagaaaatacaaagaagactgggcgcggtggctcacgcctgtaatcccagcactctgggaggccaaggcaggcggatcatgaggtcaggagtttgagaccagcctggccaatatggtgaaaccctgtctctattaaaaatacaaaaattagccgggcatggtagggtgtacctatagacccagatactcgggatgctgaggcaggagaatcgcttgaacccgggaagcggaggttgcagtgagctgagattgcaccactgcactccagcctggatgaaagagcgagactccatctcaaaaaacaaacaaacaaaaactaaataaataagaaaagttatcaaccccaaatttcactgccattatttcaccatacacttttcctgtctttttttccccctctggtataaatatatacatagaaatactaacaacaaacacatttgcataaaaatgggtcaaaccatatgtactgttttatattcagctttgttcactcattcaacaatcaaataaacaactcacaatcaaataaacatctcattagtaattgcacagttgtcttcatttttaatgatagtgttgtaggactctctccttagttcagctaaaagcccgggggtccttgtcacagggccatgaaaaattaggcgtgcagacaatttgaagggtgagcacggtggggtttattggacgaaaaggaaaaaaatacacagtgactctccacaaagccagagttctgctagtgcacttcctgcctggcagactgaacccctgtaccacctaggaagaagaggggccagcctcgtccccgctgcaaacaacgcgaacttctgtggctccatcccagtgtgtactcctcccagtgtgtagcaggtcagttgcagtttttagtttttcccgggaacccccttacacttggctgtctcaataacatagctttctactctgtgactatataaaatttctttaacccctccatatttggttacgtttctaatcactgaccgaattagtaacatctttgtcaagacagctttgcatgtatgtcgagtcgaattttctcttcaggataaattactagacacagaagctctttgtcaaatgttacgcacttttgaaggttcttactacacattgtcgaattgcctcccatgttttgcctacgtatatgctgactagctgttaaaatactgttctgttgaaagacatttatgcatatatgtaatctttatattgtataccggaaccaaattaaataattgaattctatacaaaacatatatattattttgattctttttcacagttaaatggtcccaataacgaggaacattcctatactttacttcagagaggagtttctgtcttcttgtaaatttcccatcaaaatgcaaatacattgcttgaatgggtttaatattagtggatctttttggctttcctatttatgtgtttccacacatacacccacacacatttatatatatatatgtaatttttttattttttagacggagtcgccctctgtggcccaggctggagtgcagtggcacgatctcggctcactgcaagctccgcctcccgggttcacgccattctcctgcctcagcctcccgagtagctgggactacatacaggcgcccgccaccaagcccggctgattttttgtattttttagtagagacggggtttcaccgtgttagccaggatggcctcaatctcctgaccttgtgatcctcccgcctcggcctcccaaagtgctgggattacaggcgtgagccaccgtgcccagcccatatatatgtaattttttaaacatatatatatatatatatatatgctttttctgaaggaatgagcacttatgacttaactaaaatatttttgaggactaatttttttgaatgcatttttttctgtcaattactcataaaatttattattatggcctttttaaaatggagcttttgtctttcttcagtacttttatctacttattctatttaacaataacttaccaaaatattatgtttacttattcacttttattgctatacttacacttttagaagtagcagagtataaagaaatggaatctgaagagccagttttgattccttgatattacacctgctagcttgtgactttagacaagttgctcaacttctttgagattaagtttgcccatctgtaccatggagttaataacacctacctcattgttttgccttaagaatcaaatgaagtatgtttgtacatggggtttgtaatctgtaaaggccttcacaagatgcagcctgttatcatttgaacatttcatatccagaattacttctattgtgtaaattattatgattggaaatttgatgttaagtatcaaaattttaaacatcactacactgaaattttaaaatgaagtgtcatcttttcaaaatgaccgttttatcttacaaatatcatttgcaaataatttctcccttattaacttttattgtagataaaagatatattttattgatgaatattttaaaaagcataaagccattatatttgaggaacaatttttacattcttatttcctttctgaggatgtaagtgatgaattcttgatgaaatagtatcagtattgcttacatacagtggatatattttcattactgtataaataaattactacataaatatttgtttgaaaccaaatacatcttatgtgggaatgaaggcagtttgttgttcttggcttcccatctctgcccaaaaccatttcttaatctcttaatttctaaatacaatagtgtttttgaagaaatatacagggaagagtgctcaaagagtgagttgacttggaagtgtttatttagtcctcaaaaacatgtgcaaaatatcaagaaactttgtcatcttcaaatctggaatcattttagaagatctgctttgaaaattaagcttctaacattaagaaactggcttatccaactatcttgtttcaaggaaaatagaggaggctagttggctgaaatgaaatctggttcattattcactagccttagggataatcacatttaggggaaaggctataattagctcaacttgccttttacctcatgtgtggcaaaatctaattgtttcttctttccttttcctttttttggtaaagtctcctaatattgttctcaacttataaatttcagatttccaaaatattaataaaaaatagagttgtttgcaataattaaacaatatatattgacatgaacatagattcaaaaatttgtatctttaaaatttatactttggtgctgttgattgaacttctcattatactcagttatttattgtactatggctctttgttcaactgtgagtaattaaaaatataatcttacaaagatctccaacataaacaaatctgtgcttctctacctttgtttgccttcttacagcctccagaaaggactgggtttggaagtttattttaattagagtttaagagtaatgaacattaattacagtcaaacatatggacattcccagaagcatttctacaagcactatgttcattggcagactcacgcaaacttcatgatcatattaaaaattcttcctgcttaagaccattttgcttaggcatgtgcaagtttccctcgtattttttctgatatttgtggtttaaaatgtaaaacaaaagttttatcttctttccttttatatatttttatatttgcagtaaccatttttccagaagtatttatctatctttcaggttttttaattgaccttcattatgaacattctaatatttctgctattatttcaggagagttgaataactaggaattgtagttcctacagtctatgatttttaaaaatagagatggtaatatagaatataattttattctcgtaatatgattttttatgccccgtgcataagtatatcttgtttatattttgcattcctaatccttcatattgatttagccaacatttctcttaggaaactaagtatattaattgatttacatgttaattaagtaattttcactaggtgtacttactgtgaaaatgtaaaatttatttgctgtgaagctttcccaatagcctaagtgtatacaagaaatgtagtagggagcagtttgagaatttggaaagcctttaatggaggctgtcagacttccttttgccctgcaatttcacattatatgtgttctccatggtgctatgacatatgccacaaatcttgggctagattcgaagatgaagaattatatcatgtaaatcatcagtttgatagaagagttatactcgaagcacatcttaattatctttatattataattatatgaataagataagatttggatattggctatatttacatagatataaatggggatactatattgatttatacattttggtgagaagaatatgtatttctgttaaagttaccaaaaggtgtctgggtatgtcagggtgaggcattaaccatctagcagggatacaggtacacccaagtagttataaatgtatatattaagtatataagtatgtattaagtacagtaataaaaatatttttaaaaaactgtagaaggtggaggaaaggatgtagggggcaaagcctgggatgcaaaggcttccaggagagagggcacttctgttgtgccctattaaaatgcatggtaagtactgttaaagcgttgaggacaggagtgatgaggaagtggggagttagcttttggtgggagataggagaatgattatcagaagatggtgcatgattgggactttggaggatgggtagaattctgaaagacatcagtggagtaaaggatatccgggtagtcaagtagcaggagcaaagccaaaaatgtgagaacatgctgaacatttctgtaatactcctgtttggctgtgaagtatgtaagagggagataatgctggaaaaataggtagagactggattgaggggagcctaaaatgttaaactgagctgctggactcccatttgtaggaagtttttcagcagcagtgcgtaggatggcttagaaggtagagagattggaagcacagccatgtgctgtgtgtcaggaggcagtaattggattctaacagtgaggggcagatttaataaagccctgaatagggcagacagtgacagaagtaatgggaaggtgggaacagatgcaagaggcattgtggatgaggaattgacaagacttggcaatgcctcacatagggaggcggacaggggaggatttcaggatgagctgaggttttgagcccatgcgatgtggaggagggtggcactggcaactgagatagctatcactgagtaggaacaggactgtgaattgaattaaggtggtgaaaggacatagaggttgacattttcagcagtcactaggaattaagaggctagagtataggagaactcagctactgagtccaccacactgctggatagtgctgccatgataggaaattaatattttcaggaacaaatgattaaagttttgaaaatgtggcaaggccgtcatcatcaatgcaatgcacacaaaaaaactggatgtgactaatcggatgtcagtcaaatcacttaatctttcaacagcttaattttcttagctataaaataggaaaaacagaaccagttttgtatccatctcctaaattccaggattatattaaagctattgctttggtaaaaagtatgtaatatgcagctacatatatatatatatatacacacacacacacacacacacaaatatatatactatatatacacatatatattagtttattatattgagagaactccagaaagaaaaaaaatacagttaatgttttactttctttaattgtacattgtaagatattgcagatacaaaaatttttaaaaagaattaatttttattgggctcttactctgtgataggcacaattctatgtactgttcaaatgttaatttagtcttttaattaacaccaagacattgtattattttcattttacaggtgaggaaaccaaggctcagagaaattaaatgacatttataaagctaggatttgaacgcaggcacacagactccagagccaaggcacctaaacgttagttcatgttgcctcacactgagtaaacatctgctcctgagcaggctttattttgtcattgcatttgtattagtgtggccttccctggtactctcttatttctaaaactcttgcagcccaggtatactgtctttgctttaatgcacattgcatttctttgctctgaaggtaaattggttgagggcttgtctcatgtattatatagaaaattccatggcatagagagagagcacaggctttgcatttagtccaaatgcttgctttaaatggaagcctctgtcttgttgactatgagaccttggggaagtgtcttaccaccctgaatcccggttctcatctgtaaacactgagttatagagagttaaatcacataatatatatatataaagcctacagcatctggctcctaaaagtcaagcaccagggctgacttatcccttcagcacagtaggcacagtgttgagcagtggtccccaaccttctggcacccgggaccggttttgtggaagacaattttttccatggtgtttgggagtgggagatgttttctggatgatcatcaggcattagattctcataaggagcatgcaacctagatccctcacatgtgcagttcacaatagggttagtgctcctatgaaaatctaatgccaccggggatatgacaggaggcggtgctcaggtggtaaggcttactggccattcaccttctgctgtggggctgggttcctaaccagggtactggggttggggacccctggtatagataagccacaatacttttaggaacccaaaaaatgttttagtccaaaacagtattttttttttaatatcagaagggaaaaaacaaactttcaggttaaataaattgttgaatatatgatactattatattcatgttcatgccaatacaattgtaaaatataattttcttatttcttttttaatggaggaaggggcccacagtggcaaaaagtacctcagggccgtgaaagtcataacttagcactggaaatcactccttacttaggttctttaaacctcttctggtgtctaggtcataatgttttcttcatgcattttgttgattcattagccaactaatttctagcttatgtcaattaaaataaaactgacctttgttccctcatacaataagatttttctaacacccccttcctaaatagttaatttccttttctgggttacttctgtaccatatgattaagcatctcgcaccatatataaactatttatttgcacgtctatttctcctccttgacgctcaaagcttcttgagaacatggatcatgtcgtagtgatgcaggacttctgctccttacttcagctaaatctgatttcctgtctcacgaccaggaaaaattaggcatgtggacacattgaagggtgaggagggcagaatttattgagtgaaaggaaagctctcagcaaagagaggggttctgtaaagcaggtctgcccctcacaatgaagtaccagcacatgaaccgaagaggccaggctcctcccttgcatgaggcacaaattcctggtggctgcaccctatcctgaggtactgtttgcacatgcaggcccttagtctgagccacattgatttatttcccttactgcgcatgtgttaagggatggactttttcaccgtgggcatgtttagtcaaaccctctgtgcacaatgacccggtgggtcggaacctctggggactcttccctatctgcctaggtatttggccgtctccttgcctctatcagtagccactgctatgtcctcagtaactggcagaatacatgacatttagaaagtcagtcatgaaagttaggtgaattaaattgattctgtttggaacactgacattttattgccagccataggctaattcgtgtttgtaaatgtgctctgtaactaagatttcacctaaaactttatgtatctgaagtgaaaagttgtcatctatcctgcaatattatctcctctttataagttttctatactgttcagcattcttccctaccagcccaattatttcttaaaaattgaaaagttaaataaattagtttgtcaagacatcttccccttcttgctgaattaatttaattaacaaagggcctgtcaaaatagccaaggcctttgatgtctgcatgtatggattccagtattataaatgattctgtgtccctctgacctaatgggaatacagtgtaagggtaagaaatgagccttaattcctcagtaccaaagagagaccagcattacccaattacatctaggagacaacaaatatcaccactaggatttaagtatctagctttatggatggagcagaacacataataaattattaggaaattggttgctgattagtttgcaccatatagttggtttttttaagagactgtaaagtgttactttgtttttcatttatttttatctctcccattctctgatttataactttctcaggcttgaagagtttttacatcttaatagcttgttatatacagaaaagtgaagcactagagtggggaggaactgtgtgcagtttggacaattgtggatgatggtaccaattacatcacagaagttggaggaaagagtaatttttgttcttactcaagtctggtagtgcacaatagcctgtaacagggctggctactggtagagattatttttcattcttaatatctctgaaaaaaagaagtggctggatttagcagaggaaaatcagtgtatgctcatgtatagagattgaaagttcacaattttggcatggtctaatacttggaatttcatttttattaaataggttcttctaaagttgttcaaattcttaattataaaggaaggatggttggtaagaaaaatgggtaatgattaacttgatgtgaagttttaggggatgattttctcactttagtaataacaatgacagtacctattatagacatgacatttttcaatgttttcacaggcattatttcttttgatgctctaacaggagagttttattgtcatcaatatttcacagatgaggaaattgagctacatggactttaagtgatttagacaagatcttatacttagtctggcagtattaggaccaatctgggtattattcttatttaaaatctcatattattcatgccttccttgcttctaagctctttagttcagtaagatctaatcacaggccggcctcctgctacaattggaaggcaattcaaaacaagctttctctgaccctttccaatctcgcttccctcagattcctcattcaccttcattggccacttggaccttaatcgatgcttttgctccctctgacttgggtgttacatgtggtctgtcccttatttgggtttggtctgaaaacatatttgtcttattttgtcgaattaactactcaattatataccagaacagcaggaagtttagtttctctttcctaaggtttttcctcttctccttaattattcaagaatcctgaagtttgctaaatccaaaggaaccattctgccttctaactgccaagcagagagcaaatttcacttgagccattggctcctactattgcttccaactgtcacacagtgttgctatggtatatttatcttgcacactaccatagctaatatttattcactattgatttttttgctcttgtgggtataggtcccttattatcttacaggcatactccacattgagtgccatgattacaagtctttcaattcacatttccaggtccaatcattatttcccaaactaggatagcattgtggcaggtggctgcgtttagaagggctttctgcataagcctcaggctggaatcatctctcatcctcaaaaacatccgtgtgtctaaacccaagattccagttggtattctccctttccttaaggcattttatttcagtattttattgctctttcctccaacagggatttggaagaggtcatctttatccatcttgataggtctcccaaagtttaaattttagggagcaagaccagagtccttcttccaggaggatcagggaactcagcaaatggcatctttggttgtcttccaaattctttttctcgcttcttcaaggaagaagatcccctcatacttcatattcacatgactaagaagataccttcaaggggccaggaaaataaatgtctttatgtatggaaaggctggtacaattttaaaataaattcccattgggcattctacttaatctctttgaacatgcctacatcacacttatgtttgcataatgctctatacagtttgcacttgtatatttgactcttacaaaatgcagtgaagtagctataacactttaatctcttcaattctaggtagaaagattaaaacctatgaagttagacttgttccagatagctagtaaagggatatattagtttcctggtgctgttgtaacaaagtaccacaaactaggtggcatcaacgacagaaatgtattgtttcaccgctttggaggagtctgaaaccaaggtgttggcaggtttggttccttctgagaactgtgagggagaatctgttccatgctggtccccttgctcctggtagcctgaggagttcctttggctcgtagatggtgttctccctatactgtaacatagtcttccctctatacctgctcaggtgtccaaatgcccctttttataaggacatcagtcatattggattaggacccattctaatgacctcattttaacatgatcattggcaaagacattatttccgaataaggtcccactcgtaggtgctgatggttaggacttcagtgtcttttatgggcaacaaagttcaacccacactataagttaggttttctaaccctaactgtcacaagattttcactatatactggagtctcttgtaatctaaaattttttcaatcactgttaaagcatttgttaggaatacacttaattgttattgatttaatggctcctgattcttttacaggatttttttgttgtttttaaaatttctttttaaagaattctcaactgaatcttgacttattgttttatgataatcaattttctaagagttacttctcaaaatccttgagatacattaaaaaaaatggttaggcttttaaagaaaagccaatagagatgtaacacctgttaggaaatgcagattataattgtaatgtaaatgtaattatacgtgtaaaattttttgtgtctagtaatattacccagggataatagaatgaaaaatttattcactgttgcttggttgctcttgtgtatataaatcccctttcagctcacagggataccctatgtgtaaagaattttaaagttgtaaaatagaatgggcgcttgttactatttataagcatggcatggaataatactgagatgtttcctacatttgaaaaaaatgaatttaactgtcattatcttttctatatccatttaatattcattagtacagtagtttgaaaagtgggctttagagtaagaaaaacaaatgtggctgcatctcaactgtgctgttattgtatgagtgacctttagcaagtagtttaacttccaagttttagggttttttaatgtctaaaattgagataagaagaccattttcctcataggatttttgggaatattgtctaagaaatatatgcagcatgcctataacaattccaggtactttgtgagcagatgatatacatcaacaatattgtcaccaccagttaaattaattagttccattgaaattgtgattactattttaccctattaaattaaaaccctgagcctgaaaagcaggagttgctgggattctgtgcttacagcaatattagaaacatagttggcaataaattattattgttttatgtcagagattggaactatgagtcttatgggcctactgttttcaatacgtttttctgtaccaataataactttaattgttagaacctatccagaaactcctaagattaaaatttttttgtgtgtgtgatttggctattgatttttgcttttcttttttagcaccagatatcctttcttgtttgtcccaaggcttttcattatttgttagagtgacttcatttcatggtattatctacttttattttcaagtgccaatttattaacttaaaaatgcataaaaataaacttttgttgtgtaagtaacacatttgcatgtgggaagaaatggatgagtgcacacacacacaattcaaggcacccatagtcctacaatgcacacaaacacatgtgattcaaggcacagatagtcttacacctcacatagcatcagtgtttgcattttgagataccatatcttaatgtcatcttttgacttttacgccatgttttggtaaactgaatttcgtctggattgaaactctcttctgcatagctaacccctttggtttcaacaatgtgcagagaagagaactcagcagcaagcagagtcaataggggttctaacatctctcttccagccctgggttcctttcatgtaaaggtggcatccaataggactgctgaagtagcatgaattcacaaatggaaattgatttctatcaattctatatgagctagattatcttcataaaatccaaacagtctgattctaaaacacaattggccctaaagatgttgaatgagagttgggaacttgtattagcatagggaggtagccaaggaacagtgttataaggagaagagccccagaaaggcagttatgtctcaactgcactgtgattttatgaactctaattctgttctggactcacactgctcaataacgaggatgcaaagcacctgcagcctcctcctctttattctgtccatttctcaccatgtcttgcagaccaaggcatgtttcctgaattcctagacttaatgctttctgttccattaacgatacttaatacattgccttcttcaaataaaacagatttcctttgttataacgctacatgacggtcaggctagaatgatcctttgctggagccactttatgaatcatacctgtttgtgagattgtaacacaataaattccatgccatcgttttgtctctgaattgagaagaatcccaagaagggcaaatgtcacacttaaatgctatggaaagagaagaaaaggaaggactggagaagaaaacaaaataaaggaggagattcatttttccatagtggatagctacttgaattatttttaattattgtggttaaatctaccaggaaaaggccaggtgtggtggctcacacctgtaatcccagcactttgggaggccgaggtgggtggatcacctgaggtcaggagttcgacatcagcctggccaatatggtgaaacctcgtctctactaaaaatacaaaaaaaattagctgggtatagtggcaggcacctctaatcctagctacttgggaggctgaggcaggagaatcacttgaacctggagcacggaggttgtagtgagctgacattgcgccattgcactccaacctgggcaacaagaatggaactccgtctcaaaaaataaataaataaataaagttaacaggaaaacatttagtaattgtgtattctgtttccccctacaactactgtgagtaatctgcacttttatttctcttttggcccataagttttacattaatcctattttgctatttactgaataaagggaattgagaaaaaggcatttctcattccaagttagccctacaatgccaagtgtaaaaactcaggcctaagtgaagtttgaggtcaggataagccaggctaacagatctttctggattttactttgcatctcattcattcattcatttattcatttaactgatacttattgattactgaggatgtgccaggactgtactgggtgctgcaatagtagtggatgaaacagtaaggtccctattctcatggagtttgactagtgggaggatgaggggagagcgacaagtgtcagtatacagtaaatcagtgaacgagtatttggattatataactttaaacagtgaatggggctgtaggaaaaattgaatgggtaattgggtagagggactggaggataggtaggtaccgttttagatagaatgatcagggaaaatttctctaaggaggtaggattagagctgagaaagagacagatctaagggatgtattccaaaaacagggatagaaaatactactaccctcagataagaataagttaattctgtccaatggcagtgagggggccagtgtgtaaggtacagagaattgaaggacaggggaacttggtgaggtttgggggtttggtggggtctatgtgccacagaaagctgattttgtttttgtcacaatgggaagccattagaggctttgaagcacatgaatcaacatattcttatttataaaggccattctgggaaaaacagtgaaagaaggaaaataaattaagagactttccaagaagtgagagacattggtggtttgagttgtaacattagaaacagagagcgtcataacattagaaacagagagaagttagaggattcaaaatacaaaattgagctgctagtagttgctgttgtattgatgttgggatgaggaaagagatgaatccaggatagtttccggttttgggatctgaacaaatgggaaggttatgctgccacttactgaggaggggaagacttattagcagactagccagtttgatgtgtgtttgggggtactgtggggaagtacttaaaggtcacttctttccccttttgtgtccttagtgctttgtggtgactcaggaagttagagtgtgtacttttttcaggtgatctttcatgagctgcctactctgaacttcattggctttgatttccattgcaacctaatttttgaaataccaaataggagtatcattcttctccctgcaaaaatacttatgtgtatgaagattacacaaatggccagttctcagtaaatcatgtgttcaaagttgtggttccatatagtgatgggtttatgtggaaacagacatcctcatcttgcttcatctgctgtgtaatcattaactcatgaagataacaggactgtctggggtcatgggctgtgggacagaatgaagctccattttctacaatggagagaaaatcccaagaatcagtattttcatacacgaaattaaccagcaaaaatcttcaagaacttaatccctttccagtgaatgagtaataaattttttgttcttcttttttcgtattttgtagtcaaaagctcatgtataccgcagggttttacaacactttctgtctttaaatttaaagcagcaataagcagacatgttctgtaaccagatccaaatgttctggtccctgctttaagttgagaaaatctgatttggcaaacaaataaatgagcaacaagaacagcaaaactaacttgacaaaatgggtcatttagtttggaaaggggtttattgtagaatgcctttaaataataaacaacattaaaagacttaaactataatttcataaacaattttacagagacacatttatttcatctaacattgaccttctgtaatgtgttgaatctaaattcttaagttaaagcataaagtagcatggggatttttacttcattttcaaagaaaacacaatataatctttcatttcattttcctcaatgaataaaatatttgtcactctgtgttataatgtgagcgcttctagtaatttttcatttttacctgaggtttcttttttacccactgctaagttcatttctcaggtcagcaataatgttgggataaattcataaatagttattctttgaatggtgaaaataaaatgtgttttattcatgagtaagtatagtgtttgcttgttgctgatattgtatttgggttgaaatacatattttctttttactattatctattttaaataattctggaaatacagtatgacagattttaatcagtaaagcctagcattgtatgagggtttttttctcttttcaagatagtgtatgtgaaagcatacatcaataataataaaagttgaattcagatgaaaatgctttgaaaatggtcaacatatgcaaatgtaaggtatttttattattgttattgttattctttgtcattattaaggtatactcgataatgatgttagcttggtttataattcaagcattaggtaataaagacaaggtacagttaattctgcattggagactcatattaacaaacgtttttggtaagtctattttagtcatttcatagagggctttgctggaattgtattgcttcaaatacttgttttcagtacttttacattcttggaatacttgcatttagatttttgttaagaggcagtatatggtatggtggttaagaatgtggtctatacctatggtgtcaaactacctgcattcaaatatcacccaagccacttattatctgcaagagcttggacaagtcatatagccattttatacctgtgtttccttatctgtgaaatgacaataataatagcattcagttttgatgatcaaatgtgctagtttcccagatgtgaaacattagaagaatacctggtgtatagtaaaaaataaatgtcagcaatgattatttcttacacaagcctggtgaaaattcaagtttactggttattaaattgcattggttctgtttggggtcttcctcattatgttcagagatcagcaatgccctgaggttttttttttttttttttttggcggggggtcatatttgcctgattatatctcatcgtcaagtagaaacactaaaatacataattcaaaacaaagatttgatcttcaaaagggaaagacaaagcaccatctcaaatttgctgtaccgaagggcctggctcagtgcctgacacatggtaggtgctctgcagacctgggtccacccatggattatctctgcccaggattctgacccataaaaggaagggcattctttccacattcttggtaaatctgtgtaggattcttatcttaaatgtagtctttaaccttaggagactcagaaactttgaaactatagtattatgactgaaatattaagctttttaaaaacacatactttagttcatttagctgtctaatattttctctgttcttaaatttgcaaccttttaaaatgtatggttttaaattacatagtggattattcaggtactcatctaacatttaaaatgtaaacagtgcaaatttttcttaaaggcaagaagcaggggattatcatatgtgaaagggagtagaaatatgatctttttattcttgcttgcctagattttgcagttttaatcaaattggcatttaaaaatactgggctctatctgttaagaactgtctgttgtttatagagatttttaggtgtaaattatctagccagatgtttaagcaccaaagggaaacaagttaaatacaattaacccagtcttcatttatcaagtagttaattctcagcggtaggccacaaaatcagtcttttgatcccaataatatatataggtataactatttagataacataaaatgaaagttacaaagccttattttgaaactctttaagcttggccaaattagggaacattttattcaatataggtggcttcccaaattttggttactgattgcctttgtcattgcctttaggacaactgtagactttgtggatattggaacagatataataattgtactgtaatttcccaccaggtaaatcacataattattatgggagtatgaaaatatctgagaacagggacagggtgggggtgtgtgggatacatacacatatgcatgcagtataaaaataagattgcaaaatgttgcatcatttcagttgctcaactgcagctcaactcaactcttgcatagtcccctataacattgtgttagtgtggaatttaggtacattttaatatgtttcatatgctatgaggtcggacctccctaaaacaatagtcttaggatctataaagttcttaaaactcatctgattatggtgagtttttaaacattttgcataattttttaaattctaaaagtattatgaaatgacagaaggtttgggtttgggaaacaaagggaggaaaaaaatcagctactacttaacaaaaatcatttgtaccttgctctatatctaaatctatatctacatcccattgtactttcaggcttgtactttatttcttctatgcacctacagtgaagttttaaatattctgggctctgtgtataaaggttctgagttcttcagtattcctgagaaggagcttaaaaatactgtgatttttataagtcgcattagagacctaggaaatcattccaaaacattaattttgagccaaatttctaatagggtattaaaaacaggggtatagtggaaattgtattaaataagaatcaggagtttatgttcaagtcgcacttctgacaacatgagttctatcagttgaagtatgtttgcgatacatgaatgtatatgagaaatacacatatacagtcaagagaataagcaatgattcatacgcattccccagaaccatgctttatgcttaaacaagatttatggacttgttttcttgggcttgcatttccctgtgagagagtattttacggtgggctggaaggtgtttctgtttctcttggttaacatatatggggagcaacagaaggtaacaggaatgattgagagggagacaaagagaccttgggaagggtggatgagagcagtggggaggaagaaagaagggtaaggatccaattatttacttgacatctatttgcaactctattaagtatggagataaaaagagagatgggtattaaggggacaaaacacagtggagattttagctacccccagtgttttcctctggctcactgacttccagttatcctctttctttgcttattgttacatgtttttggatatcaaagagagtatcctaaaataactttgatacagttaatgatcttagtggaatgataggagttttaaaaaagaacaaagagcattccatttgtattatagaacaattaaataaaaatccacttacagccataagttgcaaatttttaaacatatatcatttacttatctagctcatttttacctcatctgcctatgtaaacccatcgttattctaagtctcccttaataaactaagatttccttcttactctaatatttgagatctaagtacaatccaaatgtcagaggttattgttgttgttattatttccaccatggagacctccgattttctaataaaatatttttataaattttactcaacacaaattagtttacttttcatgctgtctccaaaagtgaggaagtagagtagttaagagtcataaattcggagcctgagttttggggtttgatgtaactccacacctaactaactgtgtgaccttgagcaaattacttcaaccttctgccctttcatttcttggtctataaaatgatgacaattatagtaattttctcataatgctgttatgaggcttaaattagttaacttggggtaagtgcttaaaacagtacttagaacacatagctcttcatatttcagtggttctccacgttggtgacacattagaatcacctggggagttggtgctcacctcacccattaaatcagaatctttgggggtggggcccagtactgggagcaattgaaattgggagcaattattgaaattgctgaggtgattccagtgagcagccagcgttgggaacgatggccgtaaatggctgtaattatcctgctgactaaattataaacttcctgagggcagggagtccattacttctttttatacatccttcctagtgcagctagcacagtgccttacttgtaactaatgctcattaaatactatcaatgaaagaaaacatgttgatgatattttagatgtgtaaagaccttgcaggaccacagaggtgctaattttaagcattaattattcattccctcatttattcatttatatgtgctacacactttggagtcttgatgctaaacactgcaggcatatatgatttgaaaatgcaatccctgttccaaagagtttataatttagtatgaataaatgcatacatgactttaatagaagggaaactaaccatgtataagtgctgtgttacaatttaggttcccttggaggctgtctctaagatggagcatgcagagcgtttgtttggaagtgctcttgagaataacacctctgcgtgtgctggggaaagggaaagctatggaaccattgaaatatgaaataattggacagggaaagaagttaggttttgatgcattccaagtgaagttttcagctaaccccacaggagctctggggctggggtgactcttcagagtcttaagttgggctgcagggggccaggtttttattcctgcatattgatcagtgcttggatacagctgtcactggaagtagtgaccttggatgaggcatgtttctttagcagaagcaattcccagatacaagtgacagctcagggtgccctctggcagttcttccccggataggggaataagtccttcattcctaaaggaggattcgagtggagtgtcaccgcgtccatcacatgcaacaagagataaacgaacaaaaaaaattatcctggctaaaagaagagagatcacatttatttagatggggaggataagagttagggtgaattgggaattactttttcaaatggatgccattacaatttgatatttaaggatgggtgagatttcaagaggctgaaatgaggtgcaaggtgttcctggtataggaaacaatagaggtaatggtggggaggtatgaagtatagatttgtggagaagcccatgggtctagaagctcaggctaagcagcttaggcataatttggttgactttcaggagcagggaagaatatgtgccagtgtgtattagaaagattagcctggtagcaatatggagacataggtggggcagagcttgcaatcaggaagattaggtaacaagccaatgaaataaactacactaaggatcaatgcaagaagaaaatgcatgagaaaggcaggaaagcagagaactgcaaagagctgagtggatgcaggaggcagtgtagatgtacgtgggacaggtatgacagcagacaaaatgtttctatgtatgtaaggtggtgtgagtggtcagtcaccaggggatagcctagtgaagagaggcacagtgatagagaagagagccagaaagagcagtggctttgatccattatccgcaaaggaagagacaagtgtgaccaaggtttttatagagcattgagtgtgcatgaaggtagattactcatgttgatttgaatcctgttttcttgtattactatctgggactttcttggcaatgtcagaacattctgtcatggccatataaacagcacgtatgtggtctgagcccagtcatgttggagcactgtgctagatggtactaggcaaagctatgaaatgactaatatttgttctaaaaatgctagtcatcagtgttttcactttctagccatcccttccaggcctttagagtactcatccaccttctatcttccttcttccctgtcaaaaatggtcgcttataccacagtgatggtttctccaattatatgtcatctattcctgaagtatctgtagtcataggattcaattcaaattctctttaaatgaattttggtgaataatattattttgagcaagtgggcttctgagcccctggaaatgatgttaagtgtaaggccaccctcggtgatttaattttgagggccagtattttcaggatttgaacaaagtggaaaattaagtgatttttgcggcttcttaaccttggaaggaggtcctggaatgatataaatactgccttctaggggactcagctgtgggacattgtatgacttaatattgttttaatttcttttttctcctctctgtcacaaaaatgagatggatgaactgatcatcccataatttttcattatgaaagaacttttcctacttcatcttaatgtctagggtatttcatttaagaacagcttaaatgagccctctttcaaaataagctgtcctgtaataccattagttcccagctagtcactttgtgaagtcacagaactgtgtacaatctctcttttgattctaaaaccttgggagaaagtaattgaagtatagacacttgagagtctcaattttattgctttgcaaagaaatttcaatttagagtttatctaggttacagtccccaaatatttctcaaggaggataaatcaaatttgttggagagttcctagtcatgtatcattcagtcctattacctgaactgccttgtttgacattgtcagttggaacactctcttggctatgattagaactcaaccttggtttgggtgacaactcactcttcttgcttgtttctctctttctcgcttttaactccgagattcaacatagttctttgaaatgatttatgtttcatcctaagtcattagtgtgtgcttccaagtggccaatctttcctcctttgttggttaatgtttataggaaacctcttggagtaatgactcactgtgatacttcatcacttgcctgcctccttatatttgagactttacccttctttgcatctttaaaacatattctgctctctcagtggtgaatatgattctatgcctgctctatgggtaaacacaaaccattctctatgtattaggaaagataaatgtgtgccactctcctctgtttttctgcaagaaatgttcttttatctgcagactaagaaaccatatacaaaactcatctaggttgcttcacagatgattattcatcattagagtattagaaatcaaatgaaaggataatatgtaactacttttaagaagtagttctccttttaaaataactagctcactcaagtacttctattttttaatgctactttccttactcagtaagagtcaagacactatgagactctgcgaaatttgaattctgcttgttaccgaaaccctgagcccttatagatgatgttagagagcaccttttccaaattccttcaggcgaagcctcgcaatcatgaaagaggggagaggaatgctttggtggttatttgtgcaggtgataatttgtacagaactagacttcagagtcttggagctgaagggagtcacaaaggaaggtttcttcaatctctcttcttttgcggaaagaaggatgtcatcctgactaaagtcataaagcaactagcaacctgagtaattgaatgatttaaccaaagctcactttaatgggtctgcggtccacacctgccctccaatccctatgaatttttttttcatcaatgtatcccaagcagctaaaataatgcctggcacttagaaggccctatttgctcatttactgaatggatgaattgatgagctgagctaagggaaaaaggaattcaaaatagcagttgctttcctcttaggcagtgttttttccaccacctagctataccttatcttgtttgtgtgttttgagaggcagcatagtagaatgctcaaatacagatgttttggaaaagaactgcctatgttcaaatttctgcagtgtaatcttcaacaaattacttacctctcaattttcctgtgttagagataattatagaacaatgtctcttaggattgctgtgaggattacccgagttaacttgggaaaagtacttaaaatgatacctagtatattgttggcactcaatctgtgttagctgctatctcgggaatgggcagtcagtggcatgtggtgtaacgcacagggttcctccctggaggcaagtctggaacttgacaagctcctctgaaacaaggtggaatcatggggtttcagcgtggggtgctgaagacttgcactatgcagctctcctcacatgccacattgagtcccagatttctgcaaccacagaagtttaagagaagctttgctgaaagtttgaaaccagtgtgaatacattcatatggtaaataacagagcctctgaaaaggagacaatgagatgcccaagaaattctatgggctttagtgccacccaaatagaatgtctttattggctcagctgctcattagctgcctgtcctggcaaaactattcaaatccttagaaccttagttttcttacttgtaaatttaattaaaaaatacttcttgtataaaatatgaaataacaggtacatgtaaagtgctaagtgtatcatagagatgtaataaatgataagcccttaaaataacgatcatagccataaaaatccaagggattggaaaaagcaatgcacatactatgtaaagatatcattatttcatttgcttgcttcttcagaaagtaacaaggtggtttctaggcagtcagtgccatgcaagtattttgtctcaggagcctttgttcttgaaatttttatccatgaactctgttaaaattataccatgacttcaaagtcatctctgattccaaagcctccctctaactaggctgcttgcaggagactttggtgtctttcttcagtagaagaagaaagaaagagagaggaagaaaaggaaggaagggagggagtgagggagggaaggaaggaaggaggggggaggaaggaaggaggaaaggagggaaggaaggaagggagggagggaggaagggaagggaggggaggaaggaaggaggaaaggaaggaaggagggaggggaggaaggaaggaggaaaggagggaaggagggagggaaggaaggaaggaaagaagggagggagggaggggaagggagggaaaagaaaaaaaggagtatagagataactaggcataatggacatcaaggccaattttgtcacccatttgtattccctatttttccctttcttttggagcttattgataatgaggtgtttcatctgacttttgtgagtgaaatatggctgttatcaatccatactaccttgtaagatgactggccagcttagtctgcaataacaaacaactgcagaatctcagcgcttaaatcaacaacaaaaggttatttcttgttcgtgctatgattccactattgattagatgggagctctgtgctgcttcatgcttattcagccaatagagcctccactgtctgaaatgttgctagtggccatcatgggtgagggaagatagcaaattatgatctggcttttaacacatatctttgtctaaaagactatgtggccctgacatttgtcactttgagacaggaagtaggctggaagaggaatgtgtcaaatatttggtgaccagaaagttgagtagtcattatttgggattcccgtctattctggttctcttcttctgcatacatggtagggttgcactttgatgcccatttgaattagccattggccagtgaagtgtgcataaggatgatgtgccacttccatgttgaagcttcaaaatctagcgtgcagtttggaatattctttcctcctgtccaagtgacccatatgtttatggctctgtcagtctgggtttttgaatgaagacaaggtggagtagattgctcccaccaacctaagatggatgcgtactatgagcaagaaataatagatttgtgttctgtcattgagatttgaatgttgtttggtctggaacatatcctagcttattctaaccaattctgatagggaacatattaggataaatttccaaaagttaaaaaaaaagttttcttttgtttatctagatatatatctcctcaaatttaatgagcccagaggcaatttttcagtatcatagggagaaaaaaattacgtaggctcctttgattggttcacttgattagtggtaggggtgctggtgttagtaagaggtcatatttgggaacaaggagctgtctatattaattatagctgcaggatgtggttgggctgtcaacttcttttctgctagacagaaaacataatttagggatccatcacaaatacatttatcctaatgacaggatatcggagagcacatgattttcatacacactgtctttcctttctactttttctttaatttaaatgagtttattatatacttagatattttaaagggaagattcttaatttcttagctttgttttatagaaatcaatgaagaaaggagggtattattggcaagtgggaaaacaataggtttgtattccaagcagatggtttgtggacctcaaagatttcacattctctatcagtcctgaaaattagacagagttatgaaatcaagtacagagcgtactactgattcgctgtgtgaccttgggcaaggcacttaatcactttagatcttagtttcctcattttaaaaatgaggataataatactggcataagtcacagggatgttgtgtggataaactaattaatgattgtaaaatgctttgaaagtgcaaagcgttgtataattgttaggtgctattattaagaagtattattactgtgttgtgtgtaattcttattagggcttctctttgctttgaagtcagcctccacgtggactatggggttgggataagtttacagatgtgctgctcaagtgccttttttgcctggagaaaatactcagtagctagggtaatcatcattatgaagaggatctcttcaagataaaaaagataggaaatgatctcctttttaaaaaatggaaattgctctaactttaaaagtatcaatcaattctttaaaacctcatacagccctatgtttcaggaaagtctaacatcatgcaaaatttgaaacttcaggaattttctgctcagcataacatgggaaatgttgttgctaagataactttaaatcagctgaaccagctctttctaattttcccacagtgtttgcttcaaggatgaaaacaagtgaggtatcctctagaggagagaaattctgagctgtggctgtgttttgcatgtacaaaaagttaaaaccccaatccaaattaatttttatttgttttgtagattctccgttgggaagtgtgtttctaggtacataaaaacgagctatttttctgaaggtcaagtatacaccatgtttatacgtgactacctggtgcagctgagcaatattgactttgatgcaaaaagaccacagtcaggccttgggaggatttctcattagctgtgtgagttttaacaaaataatttaacatttgcctcagtttccatatataggaatgtgtgtaaaataattcctgcttacctaataggctctggaagagctcaaagaaggtaaaatctttggaaaatattttacaaatacaatgaaataattaaattgtattacattattttatttaacattttaatcatttttaatgtattcctgagttaacaagcctctacatatatttccattggataataaagatattagaaactcaaataattttcttgcaatgatctacatacatgcctttagttttatatcccatgacatgaagagaaagaagtccatatgcactttctgagaagttgtccgttaagtaggtcaaggggtatctgagatgtgagcgggtagctttggtcatttgcttttctatgattgcacacctttttaaaaaaaaatgctgtgtgcagtcatatatgtgtacagcattaccttttaaaatcaccaggaactaggaacataggatagatttgtttgctatgcaaatgaataaaacttgtaccaaagaaatctaatgtttaactccaagacacaaaagagttgttagagtttgagcttattgtactatcataggggataaaaacttccagaaacttctgagaggccagaagttttcagagtctagctttctaggatctgaggacgaaagtacttaggtctacccttgaggcaccattattttctaccaaacatttcacttcttgtgatcgcctaagtctttgcaagaagaacaaatctcacaatccatttatttactctcctaaaaatgttgaccacgtgaaatgacaatcagtataccacagttgtttatcccctcagtggtgccagagaagaggtaatggcagagtttgtaaggtttgctttctaatttttgtcttactggcatattttctatggtagatgctctggtgggtacccagatccccctttcagaaccgaggcactatttccccacctactggaagtgttgtctgctgatgactcacggctaagtccctctactggacttgactgctggtgcaggaagctgccctctccaaggtaatgcctgcctcccaggggctagctcacatccagtgactcaacaacatagatagtacaaagccacagccccttgttttgatgaggaaactcccaaagactatcttaatgccaaagttctctgtaagtttggctgagacctgtgttacaactgaattacagttttttttgttttttttttctcaaccaaccttgaagccatcaggctgatatctagggtcaattcccaacataacatggacaagaatatactgggtctgctatggaaggaagctcaaagagccatgtgttctccaggaattgggagcatatatgttggactggatccagagggtgctggttcaaagtggttggaacagaaagttgaataagggagagtttatgaacgtgggatcacttgctaatgatagagaatttaacaccctggcaagggctttgggagatggtgttaacatattgctaaaatgattcttgaaagcttggtaaaaatgatgaccaatactataataaatagaaatgccagaattttgctgtagcagacagtggatgaactaatcaaaaggctcagagaagttgtgttggtacacagagggctgaaaaactaacagatggtcgtgttctggaggacctggagccaaacagataataaaaatattagtgagaggagcatcatcatccctgaaaagccagtggtagccatcctctgttgtccaaggttcactgaaaagatgctgttacagaattggactctctgatagcaaagaaaatggtgatgagcataagtctggcccctacaaaaaacatataaattctagtgaatgacagagggctatcacaaactcaaccaggcttcaagtacatggttggcagccattgatctggcaaatccatttcttctcatcttatcagggaggaggaacagaagcacttcacattcacttgaattagataacagtaaaaacttacagtcttgccccagggctatgttgtctgtcttggactcttaaggaacctggactgtctggacatctgctgaatctcacatggatctgttatttgatggcataatgtttatcagacttatctgcagtaagtggcaagtcttggtaaggcatgtgtgatctagaaggcaggaggtagaccttatggggatacaggggtcttctccatcagctttaggtgtctgaggcatgccgggacagcctctccaaagtaaaggagaaactattgcaattaagcagtgagacacgttaagaaggaaacacaacatctgacaagcctctttgggttctggaggtagcatacatatttcacacttagtaatactgttccagtcttttactaagggacattttaatgctgtcaactttgattgggttttagaatagaaaagagctggatagcaagttcatgccacagtgaaatcagccctgccactagagtcatataatctggcatctcttgtgcaaaccccagtaggaaaatgacaaaacagaaccatagggttaggagcaaagacatgccctctgcagctaataattatgcacctttggaaaaataactttagtgtgtgctactgggtgttggtagtatgaagcactgaaatgaaactactacatctgggattgaacacagcaaaggccagaaggcagaagaaaactgcatgagcaggtggcccctttccacatgtgagggaccacagtggaaactgcacttcttcctctgctcacaccaatagctgcatccaaggtgggggatgttatcctagttgataaagaaggaaaaagtatgagcttggttcatgaatttatcagcttattagatgaatgccagccagaaatgtactgctgcagcactactacctcattcaaaggtgcctctgaattatagcaatgagaggaaatcctcccaaaggtcagaggtttgcacattgcaccttttgtatggtccaagttaagaatatacacaaattcatggttaatggtgaatggcttggccggctggtgagggacctaggagagattgaaagattaggctgggtgtggtggctcatgtctgtaatcccagcactttgggaggctgaggtgggtggatcccctgaggtcaggagtttgagaccagcctgaccaacatgaaaccccgtctctactaaaaagacaataattagctaggcatggtggcaggcgcctgtaatcccagctactcgagaggctcaggcaggagaatcacttgaacccaggaggtagaggttgcagtgagtcgagatcgtgccatttaactctagcctgggtgacaagagcgaaactcagtctcaaaaaaaagaagaaaaaaaagaaagattaggaatgagggggtataggaagtggtatatagatggacctattgaatggtcatgaagtgtgaagatctttgtagtatgtatctgttaatgcctgtcagagggcaatcaccaccgaaaaagctctaaaaataaaatagagaaaatgaccgtagtcattggccactccaatgctgacacaatgattgcatgaatggagtagacatggtgaaaaagacagagtccatgaatgggccatatggcatgtattcccactcaacaatattgacctggccactgctgttgccaaatgcctaatctgacagcagcagagaccaacactgagcctccaatatggcaccatctctttgtgagaggagccagctagttgtcaatgaatatcatcagcccccaggtatgactttgcctttcctaacttctgaagctcagctggcatcactgtttgagggctttagagtttctgggttttttttgttgttgttgtttttcagatggagtctcactctatcgcccaggctggagtgcaatggtgcaatctcagctcattgcaacctccaactcttgggttcaagcggttctcctgcctcaacctgctgagtagctgggattacaggcatgcaccatgatgcccggctaatttttttggtatttttagtagacacagggtttcaccttgttgattaggctggtctcaaacttgtgacctcgtgatctgcccgcctcagcctcccaaagtgctgggattacaggcgtgagccactgtacctgaccaagtttctgttctatcaacattgtgtatatattacattgctttagatcaaggggcacactttacagcaagggtagttgtgggggtgggcacattacattggatgctatcacatatcatacttcctagaagctgtcagcctgagaaacccatggcacggccttttgaaggtgaggtagtagtttggcatggcatctgcaaggaaccagcttggagatgatacctgtggggttggggtgccatctttcagatatagtatatagcctaaaataatgactattttacagtgctgtattcccagtactacaatcaataggtccaggaaccaacagaaaaggaacaggagtgtccctgcttaccacctctcctagtcaccctttagggacattttttgctttccacttttagatatttgggctatgtttacctagaattcctggttctaacacagggaatgctgccacaagaaggcgtggtaagatttccatcaaacttgaagttgcagctgctccctgcttacttcaggttcctcatacccagagaccagcaggcaaggaaaacaataatccatactggcaagggtaacgtatcctcaggaggaagtatggccattgtcgcacaatgggagaaaggaaaaaaatatttttggcacccagctgatccacttaggtctcacttagtaccccctattcaaacggacaagtgtgggcagctgtgacctaagacaggtgtggtgattagggactcagtccccttctagacgagggtctgtgttatataccagcaaacaacctggactggaagagatgctagccaaagataagaagaattggcaagggatagtagaggatggagacaatgaatatcagctgtgaccttgagaccacctgtgttgggagctatagtttgtcccactaactttcctcttgtaaatttctacaggagaagagatagactagaatcctcgaggacctgctcccagagagtgagaatttactaacttactatatgaactaggtggatctgagtggcctgaggagtgaactaaaatgcgtgctgtatgtaccacctcgatatcccctacagaaatgagacatccaatccttcagttgctagtagtgttgcctgatgatgattcaaaactaattctctcaatgggaattggcctcttctcaaagtagctgtctcaccaaggccatggttcctccctggcagtaacctgcatctaatgactgggcgatgtaggagcacagaagcccagccctactgccttgatgagcccattgtgaagggtcatctcaggttcagaggtcccattaggatcaactgaggtctctgttgtaagtgccttgtagttcaccttctccttcagttcaatcccgtttctctcactactttacaggcattgttcctgggaatactcctcaataaacttcctgcataacaaatctctgcctcagagcctgtttggaggggaggaaaacttagaactttgtccccaacatcaaaatacaatttaatttaaaaacatttcagtgaagttaatatgttttctgaattagtgcacccaaaaacatttccaagcaccccctttgtgtgttttgattcttacaatctatgtcctttattcattctatttattgaacaattaaagagtgcttctcatatatgaggcagtgtgccaggcattctggattcaatgacaaaaaatgcactcagaaaattcattctggattcaatgacaaaaaatcctgaccttaaggacctgatggacaaaagggaaaagcagataaattaatagacagttaaaatacactataattaatagaacataatgtgggaatgcagacatgggataactaatttagcttgttgagcagagcaacacagagaaaaatttgtaaggtttcccaaaagcactatctgatctgaacctttaagataagtaggaaataggtaggtaaggaatggaatatgttcagagtgggaagcagtgtgaggtaaaaagagaacaggtttggagaaaagaaaacacttctttaggatcagaccaaggagtgtggcagatattagtgtgaggtgcagagagctgttggcatctgtggagtaacttcaggcaggggagtgatatagtcagcttttcattttggatttattactgtagtctagtggatgtagagagaatggattagagaggagaccagttaggagttccttgcatcaatctagctgagaaacgatggctggaaatcatgtagtagcagaggacatgaaaaaaataaaataatggaatcctgagatttgaaggaatttgaactaataaatgtgggtgatggactggatgtggaaatgtagagtggttgaagataccctgtttggattaggaggtagaaatgctattctctgaaatatgtggtgagggtgaaggtaatggtggtaagtgtgtttgtatgtagggagagtattgcaggaaggctgagatatgatgacttttaattttctatttctatttcagacatttggagatgtcctaagacaattggctatgtggatagggagatctggtttagggaccatatcatacagacagtagaagccatggatgatctcattccaggagcacatatacagtgggaagagaatgaagctgaagacaattccagctccaaagatagtgacaagagctgttcatcttcatcatcctctctgtaggcatcttgaattagaagatactatttagtgtggtctcttacccaagataaataatctaagtttccgtaatctttcctcattgttctaattgtgaatttctttggaactttggtgatgttttctatgttcccatttagttctgagtaccagaattagacacattatatttattattatctttgacaaaaatagtgctaaaaaagccttcctaatatgccatatgcatcacggccgtaggaaaataggcgtaccacttgtcacttccctaaaacaggtgctcccaaaggcaattcctgcatgtcctagaggacttttgtgtgtgtgtgtgtgtggtctgtgtgtgtgtatttttaactgccgtttttgaaccaatgtaacatgatagaacatgtattaggatgtaattggttccaggttagttaagtaagaaatgcatttaattctttctcaccccttgaagaatatttctacttctccattaaataaatcagattttaaacaaaaatggaataatccctcaaatgtaattcaaaatacaacacacagtctcttgatttgtgagaattagctattgtacttcttcttttgaaaataaccctttaaacattaaaatcaacagatgacagctttagtaatctgagacaatttcatgaattgcaatatttacttatttgggaggatgttaaatgcttttaaaaattctttgtacctgatgtgaatatataataaatgtgtagagtatttcagttgcatgtaatgattgtgaagctgtaggaaaggtggctttcccaagtcttgagtgactgattccatcttttcttccctgactccttctctccaagtcttctaaaggtataacatctgcacagatgcagggaaggactgcactacaaagatgtgctgtcaatgagctttgcagactggttcttttccctctagccaagccttttttctttttatcctaaagaaccctggtctctttttatttcctggtcaatcttaatttttctaattttcaactcaaaaacactgagatttatctccatttctctgtcttaaagagaaatatacacaaagcagtcagagcattagctaactcagatcctattatgtgctaaggtctatctatctatctatctatctatctatctatctatctatctatccatccccttttaagattcacgacaaccccatgaattggtactattattatcttctcttaaacagaggcaaaggaaagctaagtaacttgtctgagatttcctggctgtaaagtggcaggaccaggcttacagtctccacagtttggcttttgagccaaccctcttaaccatcctgttaccctgcctttcaacagtgtaaaacaacaggagcaattttggtgtgctgcggaatgtaattgggggatctgggtcagaatggagaaaaagcaagagaaatttttcataggcagccaagaataaaagagcctaagagcatctacaccgatttctataacttaggctgtaagagaagtaggaaaagcattttgtttttctgcttaaacttgttgcacagtagaggaagataattttaactaaacttgtttgaggctttaagaagtaggcctcagagactcaaaaatcaaagtgaagtgaagtaaaattagcaattgttttctaaaaattcatgtaactcttagcaatgatttaggctttccaaacaacgtaaattatatatgcagattacttctaattataatgcctttccttctagattattgaacacttacacaataggattttaattgattctcaccagcctgcatctctagtgtttgattaaaaatatgcccattgtcaagaaaataaattcatttaggcatttataagcatttgtagaagataggtgaacaaaatttaaattaaaaaaatatagttatctacatttgaaagagttccttattatttaatcccttttgaaatatgcttagaatatcctttcaaggagatgatctacagatctttatttgaatctaacacttttaaacattttccctgatgtacagattcttgagttttgtttttgtttttgttttacattttgccactcaacaagaacataattcacttacagaattatttttgtgtgtctgtaacagctgtgattttccaccttactaagcagtttggaatttatcagtacatttctatttgtcttattttttaaatttttaatattttttaaaagaatatatggaatcgttaaatgaaatttacaagagttcattgctttggactgagttccagcactaggcccaacagaccagacaaaaccagaatggaatcgctgtgccacataatcaaactgaactttgaaacaagccagtttttcaaaagaggagatttacagcaaccaatcagaaggggcccagtttacctgagctggcatgataaggaagtcgtctctgttttaattccataaggaaagtaactttgaaacaaccacttctcttttgttcacggtttctgctttttcttagcccttttctgcctataaagccatactcctgatcagttcattagaacactcattctgttttctggaatgagatgttgcccgactttagaattcaataaaagcctattggatctttaaatttaagaaaaaccgggccgggcacggtggcttacgcctgtaatcccagcactttgggaggccgaggtgggcagatcacaaggtcaggagattgagaccatcctggctaacaccgtgaaaccccgtctctactaaaaatgaaaataaaaaaattagccaggcatggtggcgggcgcctgtagtcccagctactcaggaggctgaggcaggagaatggcgtgaacccaggagcggaggttgcagtgagccgagattgcgccactacactccagcctgggcgacagagcgagactccatctcaaaaaagaaaaagaaaaagaaaaaccaattatatctttaaatttgttgtaattttgtcttttgacaggatctttatgaagttacatgccattgacaatctttgctgtgttgttgtaacttcaggtatgctactgcaatgagcatgccagttggactcttagacaatggccatctgagtaagaaaaaatttcagttgttttaaaaaataagtgtggtattcattttgtaatttattaaaataacatttgaattttcaaactagctattccctgagattcagaagtctttttgcctgctttttttttttaagatgaagtaatctggctataaggaatattgattatattagtctaaggacacttacagagaaagtaagcttactgtagtgtgaatgatgcttctctttctattaagggtggtcattctaaatatgactgcataaggaataattctggcaaaaatcagtccttcattttctcttaagatatttagaatttaatttaaatattatatgtcaaggttaaaagttagaaacatgtaaggaaatatttaagaacttacaatatgaaaacctgttttctttatggaactctttggttatatgattggataggtaaaaacaaatttgtaaaatatggtagatatgggaaattgtcaatatatttgtaattcatgcagcaaacataatatttaggaagtatgttattctgttttcttaagtacataatgataagggttcttttctccaccaagccccttttctacatttgtggttttcatttttgctgtttttatgttattattgatagtatctcaataccaacctgctattgttaatttgtgacattccttatttagtctggaaagtggaaggtagtagatagttaaaagtttttggtgtctgatacagagatgtttatttaaaagtatagtaaacaaaattaaataaattgagatgtttttgaaacatggcttctctaactccgaagaactttgtgacaaaaaatgatctcttatgataatattttaatgtaaaatacaagaaattctttgaattaaaaaacattgtcttgattatcaccatttaggcatatattgaaagttctcatttaagtggtagaaattatttgaaatagtgttagtttcctgtggctgctgtaacaaaccaccacaaacctggtgatgtgaaacaactgaaattttttctctcactgttctggaggtcagaagtctgaaatcagtgtcgcggtgtggaagtccagatgtgggggagctctgctgcgttcccgcagaggccctggagaggaacctttctctttcctcttcctgccagtagtggccactcgccttctttggcctgtggttgcatcactccagtctctgcctctgtggtcacgttgccttccccttatttgtctgggttgaatttccccatgtgtcttttttataaagacatttgtgattcattttaagcccatctggataatctagaataatttccccatctcagaattcttaatctcatttgctaagaccctttttccacagacggtaacatttacaggttgcaggggtatctttgggggccatcattcagcctactctggtaatctttattcatatttaatcttcttcaaaggaaattgaagccaatgagaaaagcagtttcactcaactactctgagttggtgataaataaaaaatccctatttctccaactggtgttgcatgtaaagttacctgctatatattgccacctggatgggctgccttcgcatgaactaaattcaaataaacttaaaaaaaccaaattcatcatcttttttcctgaggtagcaactcctcttggctccgaattctccttttagagtcaccatcatcccagttatcgaggcttcccttggcagtcatctctgactctcgcttccttctctcccacatcctgtccttaaacgacctccctcttgagttttcacatacttaaaacatcaccagacacataagtccattgaaaccacctcaggcctttttaatttaaagactggggtatcatcatagcctcctaactggccacctcatgttagtattcccctatggcattctctcttatagccactgggttaatattcctgaaacactaccatggccatctaattttcctgcatagacatattgtttggctccttatttcatctgaagttaaatataaactcagcctggccttgatttattttgtagcgttatttctgatgctctcctcacctgacactttgggtccaggagcattgctctcttcacagccccctgggcgtgccatttcccacaacccgccacacccccacttctgacatgccttttcccaccttgcctttcaaaagtctactcacctttcaagatccatctgagatgtggcctgaagtaggacatttccctctctcatttctaagtaatgtctgccacattaccagcttgagttacacttttccataagcttgtcatccctttggaggatggacactgaatgagcaaagatgatgccttgtccattgttaaatttcttcagtgttttgcacagagtaagcatttaataagcatttctcaaatgaattttgtaaaggccaccactggaagtaatttgctgttttcacatcgatttgtatattcctcctttccatgtgcttctttgatcacatattattcataaaccttgtgactgtttttcatgcctaacatttggtcacaattttggctttttccttcttatccctccccccgcccaactggagtttaatttattttcctatatggtcctgtcagcagaactgttcagagaatttgggcaaatcaggacttcctgagagagttttacttgaattgcctgtaagtctgtaaatgttgtggggcatagaatgataggaaagacctctggttttcaatgctgaaggctttttattgttaagatatccaaaataggcatagcatgtttaaaagtaaaaaccctggacctgctctctctctttcatctgaaattatgtgtttgccagagtataatagctctagacaggaagttatgccctcagggcataattcttgcaagggagagaataaaaagtttagactcatgtcacatcctgaatctcaatcccttcatgtctgggcaatctgcagggagaacttttgttctagtcttctttgccagagagaactctggggttagcattttagtccacagtcccctgatgaatatttattgagtgcagagtgcaatgaggatatggaggtgaaggtggtgtggcctgtgtcttcaaggagcggtgtccctatagttgtcagaaagaaactccaggaaaatcctaaagagggagtttaaaattgcagatatcacagttatacaatcagtgttgaattatttccgttttcctcatgatcagaggcccctggagaggcactctggcattgtcctagtattactatcctgtggctatttcaattattgcttgacttcttcccaatgctttcactcatcttgtcatggtttgggctagaggttccttcactacacccactagcaaaggtgacaaagccagatttgtacctagaaaagtcactaaaatgctccattttccaactttccaaaaagcagcaatactgatcatactcataagtaaataaagctcattgatattgaattatctctacccaaaaagaatgtccatcacaatagtgttcataaatgagaggcccttctttgcaatacaaaggtaaaaaatgcaacataaaattgtatattgtgctggcaattaatttttacttattaatacattataacagttactttctgcctgatgtatttgtcatttacaaagacacaagaccttatttccatatttcagtcagtgctttattttgatcaatactgtattcatgtatgtaactctcatatcatactcttgagttatgttgaagttttaaacaactattagacaaataatgaatgttacatgttgggtacaagcatcctttgaaaaatcaagaagataaaagcaaagccaagagtatatgattcattttaatgtaatactgggataaaaatgtgaggatgtgatgtcaaatggtaataaatgctgagttttcccaatgatatgagacaaatttgacagaatacaaaattttaggaacatgtttataaactaaattagtctaatgttcaatgggaaaagtggaatttgatttatttatgttttgctttactgcatttattaatttttaaataccacacaatttattttcaaggtttatttatcttcatgtttacttgatgtaattctattgctcattatattgcacagagcttgtcacctataagaataagagttctatgaaaatggatcattttaatgtgataatgaatggaataggagtttagcttcatttcatttttcatgatagaatttgtttcggaagttcctatcctccatatcaatgtcacgcccaaatatttctggcttaataggaacttctgaaacaaattctatcgagaaaaatgaaatgaagttaaattcctattccactctctgacccccgtctctcctctgtcttcctcctggcctcttgcctccccgcccttctccctccttccctctcttctttctttcaccggagggcactacagcatttaagcttacacccctgattgaggaccgtccctttcttagggactccagaagaaacacctgcaatgttgagacacgaaaggcaagagtgatcctggaaagccaaatgggtgcctgtagaagaggaaatgatgcacagggattttgctttgattcatcaccaggttgactaggtgaccaggcttcttaccattcatgtgatctgcacctgtgatcaaaagccttctttatattctgtgagaataaaagaggatggccacaaaatattctataatcttctcagtgtattgtacttcatatctacaacaatattttgagcacctactaatataagggactgtgccttgtatccaagatagaaaaaataaaatagctcctgctctatttggggaagaaggtcaaaatcagggtaagggaatccagaggaagcaaaaactgatactgacggagtctgtttaagtaaaggcactgaattgtggaaaggtaaaacacatatgaagactggaattcaaataagaaggtctcccaaaagctgaaatgcagaataatgatggtagataaaaataatctctgacctgagatggtttttcatactctacaaacaagatgggatttgttaatagaatacacctactgaaaaatgagactggagggagctggtgggaggaaggaatggcctgagagaacaggtgggggaagaatagagattcagaaagattccatcaaacacttttgcagctgccgttctatactggtttgaagtcctagtttgccttgatttacatgtgtctaacagttgactctactggtatatgtgtctccagctttaagaagaagaaaaaatccactctaatgacggatattagttgccacttaaagatgctcttcagatactagtgttccagttaaccattaaagatatataacccctgtacaagttggcaaccataccaggtcattgatttattatcattaaactgcctaactagtagttatgttgagatgaatgctgggtaaaatattacaatgaatgctaaatgaaaaatacatctcaggcttgtaagctcccaccttgtgtagtatttctgtgttccctgacaccctgaagcctaatcgtgccttctgtatagttttacatgtgtagactctcttcttcgttacgatttgccaatcccctgttgctcacattgtactacagcaataatctttgtcatttttgaattggtgtccaggtggttgctgtcacattacatccatttttaaatgttgctcaaacccactgaggtgacatgcagttttccaacagtgtgaattttttttttccaaattttttctcttcgatggaagaaaaatttgctgtcttctttgacagctggacaagtagagattgcaatctcctttccctctcagtattctctggcaacatcatgaataagcaacattttagatggttgacttccaaaaaatgtttcttgtcaagctcctgtcaggattttggaagtcagggaacaacttttttccagttgtgattttctataatttcatttctgaagtctgaattatgatttttttttctttctgggtttttttttctgtagtaaaaggcaggatgggaagaaaaagtagctcagttcctttttgtgttgatgtagagggtggtacatcattggaaatctataatgggattttctaaactggtagtttaattattgttatattttaagttgaattatctctatcatgagccaatgtctaaataaccttacagtaatcatttttatggtatcagatgattttttaaaatattattacatttcatacttacaaaagatactgggaaatacattagacatttcagaatttctctcagttatgactatgagaatgaaaagaaagtcttttaaacagtcctgggattttttttttctgctgctatctagtctacttcaagttgtaattttcagtggttcttgttggtaaccccaatttaggccactctagagataggcctcgacaggattatatatagagagagagctcagcttagtcgttgagagcatggactcagaagatgggccagccctaaacctgattctgccaggattcatgtgaccttgaataaatttcttaccctctcatttgctcagtttcctcatctgtataatgaggataataaaaatcatatttactccatgaggttgttgtaagaattaactgagtgaggctgggtgtggtggctcacacctgtaatcccaacactttgtgaggccatggcgggaggatcacgagatcaggagatcgagaccatcctggctaacatggtgaaatcccatctttactaaaaatacaaaaagttagccaggggtggtggcatgtgcctgtagtcctagctactcgggaggctgaggcaggagaatcacttgaacccaagaggtggaggttgcagtgagccaagatcgtgccacagcaccccagcctgggcgacagagcaagactatgtctcaaaaaaaaaaaaaaaagaaagaattaaatgagtgaatatgtgttaatctcttaggttagtagcacatagtaggcattgtgatggtaaaataatacatacatacctaatttatatccagcctcacattttggtactgggaaactggatatcttgttcaacagtggtattcatagtttaatctcggcagcaacaaagtgccctggggttcctgactgaggtagaagaatttataagtgtaagctgtttccattttagtgtagtctaaggtaaccctctcctttctttttttcctgttatgagtaagcttaattttttttaatatatagagtttacctttaaagaagttaacacatcattaagatctaggtaccttcttcaactctccccattcactcattccatttcaatttcatgtactccaatcaactttggtatgttttgaaatgttattattatttatccaactttagaaggttctggtagagttagttcctgaggctagggaaattcttttaattaataatctttctgttaatcaccccataatctccatcagctctccaatccaccctgtctgtggccagacaggactgtggtttagttcaattgccgtcaggatacacatacgcaattcagtgagaattttgccaccatttttcctctttcagaagttgattacagaatagccatcattcaatgaaagtctacaggcttctctaattctcttgcagttcacagtcctttagccaacagcaactctacaccatcaaaagtaggatttactgaggtatcacttaaattcccccttgatttaagttcttaagtttcaggaccacttaagtattatgaatgacaaatcaacactcacatagtattgcagaagtatagcttgagtaagtctaatggggaacactttttttacaagctcagggtaggggatattttttgtcactccctcaagcaagcgaactacaccagtagaattataaatcgttctcaactctccctccctttctttttgttccacctccagaccatagtaggggtttaaaatttttggtgttgttgtttacttttttggtacttcggggttacctgtggacccctttccagaatattttacaggcatacgataaagtgcaaaaacttacttaggaaatcagttttatggaaatatactgatcacgattttgaaaaatgtgaagactaatttatgtgcttttattttaacacattaaataacaacagctaacaacaggtcaaaaaatcactgcaattcccaagtactgatgggtataagtgaaatattgagatttctatagcaactggaatctaataggaaaataactgtgatttctgctgttgacatagtcacaagttttcctgaaactactttgcttttttccctcattcacaagtgaaggaaatgggaagattcactcagagattagtgaaaaggatatttttttttctaagttcatgaaccctaagtccctgaggatgcagacatatatacatctagttttctatccctgaggagctttatagtctactgggagagacaggtggcaaggtcaaagagtgctgagaagtggggccactatcaccccataatcttcatcagcccttcaatctaccccaaattatctaatacaggcacacttcagagatagtgtgggtttggttccagaccactgaaataaagtaaacagcaataaagtaagttatgcaatttttttggtttcccagcgcatatggaatttatgtttatattctactatagtctattaggtgtataatagcattatgtctagaaatacaatgtaaataccttaatttaaaaatattacttaaaaaatgctagcaatcatctgagccttcaacaagttgtaatctttgcaggtggaggctcttgcctcagtgttgatggctgctgaatgatcagggtggtggttgctgaatgctgggatggatgtggcaatttcttaaaataagaaaacaagtttgacacatggattgactcttccttttatgaaagatttatctgtagcatgcaatgttgtttcatagcattttactcacagtagaacttctttcaaaatttgtatcagtcctctcaaaccctgccactgctttgtcaactaagtttatgtaatattctaaatccttttttgtcatttcaacattgttcatagcatcttcaccaggtatagtttccatctcaagaaactattttctttactcatccataagaagcaactcttcattggctcaagttttatcacaagattgcagtgattcagtcacgtatttaggctccacatcttcaggctccagttatcttgctgtttccaccacatctgcagacttcctccactgaagtgtttgaagctgtcaaagtcatctgtaagggctgaaatcaacttattccaaacttatgttcctgttgatgtttgaattttcttccatgaatcacaaatgttcctaatgatatttagaatggtaaatcctttccagaaggttttcagtgtcctttgcccagatccattggagtaatcactatctatgtcagctatgggcttacaaaatgtattttttaaataataagacttgaaagtcaaaattgctccttgattgatgggctacagaatggatgttatgttagcatgcaagaaaacaacattaacgtctttgtacatcttcatcagagctcttgggtgactgaatgcattgtaaatgagcagtaatgttttgaaaaaaatctttttttctgagcagtaggtctcaacaatgggcttaaaatattcattaaaccatgctgtaagcagatatgctgtcatccagactttgttgctccatttataaagcacagttagagtagatttaacatagttcttaaggaaccaaggatttttggaatgctcagtgggcactggcttcaatttaaaatcatcagctgcattagcccataacaagagagtcagcctgttctctgaagccttgaagccaggcattgacttcttccctctacctatgaaagtcctagatggtatcttcttccaatagaaggctgttttgtctagattgaaaatctgttagttagcgtagacacttttattaattgttttagctagatcttctggataacttgctgcatcagcactcgctgcttcactttttacttttgtgttatggagacagcttctttccttaatcctcatgaaccaacctctgctagcttccaacttttctcttccagcttcctcaccattctcagacttcatagaatagaagagagttagggtcttgctctggattaggctttggcttaaatgaatgttgtggcaggtttgatcttctatccagaccactcacactttctccgtatcagcagtaaagggctgtttcagtttcttatcattcgtgtgttcactggagtagcacttataatttccttcaggaacttttccttcgcattcacatcatgggtaactatttggtgcaagaggcctagcttttggcctctctcagcttttgatgtgcctttctcactaggcttaattatttctaacttttcatgtaaagtgagagatatgcaactcctcctttcacttgaacaactagaggccattatatagttattaagtggcctaatttcaatattgttgtgtctcagccaatcgaaaagcccaaggagaggaagagagatgggcaattgctggttggtggagcagtgagaacacacaatatttatcaattatgttctcctttttttatgggctttattggtggtgcccaaaacaattgcaatagtaacatcaaagatcactgatcagagatcactataacagatacaataataatgataaagttagaaatattgcaaaaattaccaaaattgtgacacagagacacaaagtaagcatatactgttggaaaaagtggtgctgatagtcttgctcaacacatggttgccacaaaccttcagtttgtaaaaaaaatgcagtatccgtggagcacagtaaagtaagctatgcctgtatttaaaaaaataaaataaaaaatagaataaaatcttaggttgaatattaataaaataatgtttagaaaacattagtatttttactgttgcataacaaaatatccaaataaaacttacatgttttatatgtgaatgccactttacataattcccttagctctgctttcaaagtactgttgctgcccaatgtcatatccccctccatccatttttctatatggaaattctggagcccccactgggttttaaaacaaaaaataggttaaaagttaattgcagtctcttaacattattattatgtcagtgcaatgctgagaacttgttggttgagtgatggtggcagctgttacacagtggtcatatggcagattgtaaccctgaggcctatccacaattcaaagctcatgtcattgccagctagtgtgataactcatacctggcatttttgtttactagtgcaaatggcactgacattttgtgaaaacattgtaaaaagtttgattcatttggtctatttgaaattaagacaggcttgatgagctctaggagcattcacaaatttaaatttataaatagagatgttaaagtattttatattactttgtgtcataccattcataatgtactcttccttaaaagaaagaggaaaagaaaggagatattaagttaagtgtgttaataggttataccagtgtttgcatgttagatagtcatgtggtttagcttgttacttggcatatgtggccccgattgtcacatgacaaggcacctgtggtgactgtcctttgttcacagctgcagcctcagctcatgccacagtacctgaaacctggtattttataaagatttgttgaatgaatgtatgggtaggtaaatgaatggatagttggatgcctgggtgtgtggatggatagaattttttttaaaaaacccaaaacttccttaagctgtagttagtcatctataacatggaaataataatacgtaactgataagattattatgtgaattaaaaacaataatgtatataaagtacttagcttgcatataagtgggaaataaattgtagcattaataaaaatatataattctggttctattaaataactaaatattttttgccaataattaaaactgactgcttttgtgagtctaagaaacagcagtgaacttggattacagttttatattctttgcgtctagaaagtgatgtttcatcacaaggcaagggctttcttctcatgacaaagagcctgatgtagctgcttaataactgttagtaacactgaaaggatctacagtaaatctgttagaaagctgtgatcaaaaatgtgagtgccaatcttcaaaagcccatttcaaagcttgtttgctataatactatgtagtggtttatttgcctttctttgtaactcattaaattaaaaatttggatccatcctcatggggttttcagaaatggttttataatttagcattccaatgacacttcttatttgcagattattatatactagtttttttgtcccactgtctcaccccagtgtagattattaagtccatatcattgcaatttgccaaaactctctggataaatgtctatgagagccaaggctccattttacttgtttatcgaatatggaattaatgaactatcttgaaacaatgtttataactaatgtttatatgacagaaaattggtgctgatcgtagtgtacatatgcaaactaatgctattttgttccccttgcctgaactctggctacacaggcagaattatattgctgttgtgttcaaacttcaaatacaatagtaactccagatgccatttttgtgttcttgtgaacttggagtgggtaaccaaaagcaaacaacaaaaacaaacaaaattgggacaggtgagaggcagtggcatggaagggagtgtaggcaggaaacaaataatatgatgactacaggatactacattctgatgaagactttacacttatggattgaacaactgttagaaaaagatcaaacatattatttgcacaggggtaatgattattttagaattacttcctgtcagtgataaatagctttatttaagcaaaatccaacctcttgaaattgttctccccttcagtgttatttttgtcattattttttcttcacttaaattacatataactgtaaagctctttgaaaaagtatattatctaaatgcatctatttaaattgaatgggtattaaatttattaaacatatttacaaaatataagtaagacatgaatttaatatgagtctgttgaatttttcattgtagttgaatgaatgaataatatattctagtcagccttttcattttctggtgcttctttttagcacccatagactttcatatattgtaaacattttcttctctatatctagttttagaaaataaaatgttgggaacacagaattgacttctggagactgggaagtatataactaaagtaatatgtgtttgctttttctaatttaattttgattgtggtgtgcttaatttataatcttttaaaatgttttaattttactcaaatagatctgtacatactttttatactcaattaacataattatttagctatcatacttccgtgtgtaagatttctagagcatcgccataatgtagcactttggtttgcaggagagaaattttcatggtacattatttacttgcattcaagtgaaaatattgttaatattggttgcatttgaaggattctttcaaaagtacgtggtgctcaagatggatttaaatggaacatgcaagagacagtaataacagagagatcacattctctctgtaatttattttaatgccattacacagggaattcaaggcagataaaaaactccatttacagaaaccaaatgtgcagaaatggattgtcataattccagatgaaatcaataatacatactccctggcatattttttattagaaataacttggaaaaatttatattttctactaagtaaatatataagttataagaaataacttatatattaaataaataagttataagaaataccatatattaaataaataagttataagaaataacttggaaaaatttatattttatactaagtaaatatacaatcatagccttaagatcttttgcagcattactttccccttgatgaattacaatgcaattttctagcctactcattttattaaggaagctaatgactggagcaaaagtctaatcagctgccaatcaggattccttgaagtgcagagtgtcaaatattgaagcaatttttacaactcataaaagcacttatgttccatggtatgtcataaaacttgtgatgaaaatctagcattgatgaagctaccttatttctcaagtgtttttccccaaacaaacagctttcaaatttcaccaaatctttcattaatattcaagtctattaatatagcactattatgttatctgttatagtattatattatccaactatagcaagataattagttatatataaacgtcagtcagagaacttagtggattcatcataaaagctgtaatggtggaatttttttttccatagtaaaaaaattggtctttcttctgataatgttagagtgggtttttgtttttatgttacagaaacaatgaggctgcacactttgctttcaccctttgcatcattatgtttgcattgtttatttttaacataatggtacattgtttcatgaaaagtaaccatatttcaaatcattaattcacttgtcatttatcattttaataccagaaagtagttaccttcctgtgtttgaaggtactgtataattgtatttctttaccatgtcgacttcctgtctcttaaaacgcagcaattacgtgtgtgtttgtgtgtttcttcatctgcttcatgcatataaatatgtgcgggtgtctggggttttgttgttagctgagaggtgggaagtgtttccacacatctgaatatttgctgccgaccttcttgatgatccgtctgttaatgtttttatcaagctggcacacctcatgtgggatcttaataaagtaatcagcattttccctctaaaacaagtttgagaaaatcctagttaaactattctcttcaacacttgaaggccttggttgtacagcaagcagctactaattcaggaggatttatttggcttttcctgagttctctgaaaaatctatttgtgtaaaaagaacatactgcatgatccccagggctcctggaactgaaaactcaaggatttagacgaagctacccagtttgtttaatcatttgaagttttgtttcagcagctcatgctttcctcttacattttggcagaggcagaaatctcagatgattgtttttgggtacacatgtaaaaattttctcattaaccttgggggtggtgtaatgataaaagagataacattttgtttcaaaaaaataatactaactgagcacatatttcaatgcattgcaaatctgaaggaattgtcatggctaacaccatctcagtctcagtatttgtgccccagttttttttcaggtcaagaatgtagggaaacactgtactaagttctcattggatcccttgatgcctcataagacacccagacccctagctctcaatttcatttctaaatgtaccccagctactagaatctctctcacaatgatgacaaacatcctctttaataggacagataaatattcctgtcactcttgactgagagacaatactccaggtctaggggacatgatctgcaaggaacttcccatgattcaggcaccactattcctgttcattttttttccattgtcccgggatttacagctttcaggagtaccttcatgttactcttctcataagagggcaacaccatatttttctcactgaatcagaagacccaacaccacctctttccccagagcactgccatttgcatcctatccagctaggtagggcaaaagtgtctttcattagactaaggacctccacaggcagtgcttaattttcatttacctttgcctccatagtgccttatatgtagtgcctaaatacggatggtgggtgactgcttagagtaataatagctaatatttttgtgacattagaaatggacacagtggtaatacaggtcaggattataactcaaaatcttggcaatgtgatgtttattggaacaaaggaacctaaagatcagaatgctttctctatgtaagatgactaggcctgtaaagtagagtgggtcactattctacagaaacacagatatcaatatttacattacaaataagatatattaggccattcatacaatttacaaaatggttcattataggactcactaactgaaagtacccaggtgacattgaacgtccagtttattttcaatataatcttcctgaaatctctgtattaatttggaaaaagtcaacaaagtaaaccattcttaatgtaacaactggatttaaactagggaggatcaaaatgtttaggtaacagaaactagcagtccaatgtggatctttctactttctctctttttgcctttgcctttgtctacgtctactttctctcctttgcctcttctttgtttatttaaacatatatatatatatatctatctatctcacatactcagaggtttattgcttagttttgttttttataaaaatggagtcatactatacacactactctgcaacttatttaagagtatactatgaatattcagttgggtcttattaaagatctaacatcctttttaattgctgcttaatattttgtactttataccattatgtatttaaccaagaatgtctttattaaataatataatcttcacctatgccagttaatctgttattcttagtgatttaagctcctttctctcatctggaaaatacagcaataaataggtaaaatccacagtttctccttcaagtgctacgtgcaataggcccatgaggtaacccctgaaattcatgttttcttggaagtaatcagcagacctggagtcctgtgtatgtttgtgaactccagaggtccacactccttcacttcacactcagtgtcctccatacttagggcttctacccccctgcccagttttgttaaagaaattactccttgggacatggacaaaataaaagaaatagccatttgtgtttctgtatccaacacttctttgtcctgtcatgggttcagttagttctaccatgaagtatggactgtctggtaagaggaaagagttttagagattaatgagggtagcactagtgaaactagtctcaaagatggcatagtcaatttcctcagatatagaccaatactgatatctaaaaagtttattcttatgggtagggatgtctggatgatagcaatttaagtcttcaagggagagcatctccgttgcttataggaacaatcatctggactaagtcatgaccacagttctaacagggaaagtaagcaagatccagctcccgaagaggagtttgcattggctgcaaaggggatccaagaccttagctcagtgagccaagcttcagggaaggactgcagttcccttagggacatagaatgctaacaaagaactggttttggagcttggtcatggggctggccatacatgttgggggctggcatgtttatatgacaaggtatttaggctttccacacctaaatattcagctatatctctgtaagtgcatagatccctaaagagtttgccctgggtacattgtgctggttgtcagataagaataccgaggctaataccagggccctccctttgttagaactctacatctaataaacacccaggcttggttctcattgagtcacaggctgggtggggctgagcctacaggttgaatattctcagttcttgactctggatccaggtggagtatgcatagactgataacaacttgtttttgcagtaagtctgaagattaaagcccttagttgagccaataccttccttctcagataagtcaaatccacatattcagaatgggagcaggaggcagaagggaaaattttgtaacctcttaacagttctagacttaacacatcctactatcaatctgagtggatttgttccagatgcttgcatggctgagatatgcaaaaaactgtctccccatgctgattggtagcatctttacatgggcaagtcttcctacttgtaaagaatgagttaggtgtgtctgggacttactaaggagtctcaggtgttgacagcttaaacaccttgccatgtaaatatgtctgatctctcttccagttcttacacagttggctgtggttactgacttcttattttgttcaggtctaaatgaaattgatcttgatctattactttaccctaggctggagaaacaactttagtaattatctcctcacccctacttcccttttgagctttgtaaaaatgattaaggagatcagaatatatggcataaattatcaatggttcttctccattggaggttagagttccactgtcaaaaattagtaattatcattcttcttacaagtttaagactcaaatggaactgactttttcagcctatttgttgtctatggtaaactaacagcaaacagctggatgttcttctgtggttacataaccttaatggagattagttccttttatccttctatactgcttccctaccaaatgattagattttttgaggggcagatataaaccccttccattgtttaaaaaacattgttaataacccttcgcactacacaccaaagtgcagcctttaatatagttgccagaagcagttctgagtgaaacactgaaatgaaaagtaaactcatgtcatttggtctatgataagcattcacagtttgaaaaaccccaaacagggatagttaagttgcaagcactatttccagaatgagagttgaaaattatatacataatgtggaaacaatagatcaatgaaagggagtatagaacaaaagagagaagaatttccatagccactccatagaatattaggtctatagaatgtcaagaggggttatgtccaaaacagggttctaggatcagataagtttggaaggtacagaattaaatgtcattaaatagatttacttcttgcagtattactcattatgcactgtgaatttccaagacagggacagcgtatgctgcatttcccaaacttgtatggtctgatgaatccaccgaagacagtgcttttatagggggacgtcatgatgccaaagagaaaagagcttaagaaaggagttcaacaggtcaagaagattagtgcataggaacttacagaggggaaattggtgcctccacagcattagttagaactagaccctgatataataggggaccagaagaaaggagggcatgaggaagagaggactgggctgcacatcctggctttgactggaacatatttcccaaatccttggtgatcaaagccaaagtaaatacaaccaaggttatataggagtaataagtgatggaggtagggagtcagctggatgaggcagagactggaaatccttgttttgacctcaagcctcaatcctgaaccatattgctatattgaaatatagtcaagaaatgaatgtatcatgcatagtggcatgtcaggaagttcaagtgtgagaaagccactttgttataggcccaattcctggaggaggatatatgcctctccagatccatttggcttcacttgtctccacagctgtggcaatcagttctgcatggactccaactatcttcctgtggggactgccgaccagtgtctcatcaaatcccattcccactgcggatttctgtgttggtgctacctggggaactcaggctgaggcagtgtctcacctaggtagcagcctctgtttcttgtttatttagagagtaattatgaattcataaactttcatattattacaaatcttactggagtatctagtaggggcttagttatatgctaaacagttgtagtttgaaaagccataataactctggttatttgacagatatcaaggcagggcaaagagatacccaactagggtaggtcatcccatcaatattttggaaacatatgattgcctcacattgtatatccttatcattgttttcttttaattattttacatataagtttagacagttgactgttgggaattcctattcagagatttatcttttaaccccaaatgattaacctgtaagctgtgactttcagtgttctggtattaacaataattttacacatttcaaaattatagtggaaagtaattttaccataatattttatctcatataacaagagcatggtatttcttttgtcgaactgcagcttttgtagataccatacacattattaatttcaaacatatcatttattccactagaattccattttttcttacctaatttatttccctttttaatactgagaaaaacagtatgagattgactattgaatttaataagatagtaacttaacacaataactaaaaacattggaagtttaaaaacaacagttttttcctaaacctgactcgaaaaccattgacattttagcaaacagatgggttttatgtaccacataatgaggtcctgggctcactcaagaccaccaggttgaaggaattctaaagctggagatcttttaaagatggcaaaatgactatgagattatctaaatatataattaaggaaaatagatcttttctgtttgtccttggtaaagtcctcaaggttgcatatgaccttccattaattttcttcagtcccaataggtgtttattttgccactgggaaagaattaggatttaggtaatgtctttgcctcacacttaggcttcctaacatgttataatgcactctatgttcatttcttgcctgtgttgcagtatagcaatatggtgaggactaaggtttagagtcaagcaattcaggatttccagtctctgccccatcatttattagccgtgtatacccttggttaagctgattaccctctctgagccttagctcatgaaatgagggccatataactcatatcactctgttgcccaggctggagtgcaatggcgtgatcatggctcactgcagcctcgacctcctggactcaagccatcctcccacctcagcctcccaagtagctgggactataggcattcaccaacatgtacagcaattttttttttttttttttttgagacggagtttcgctctgttgcccaggctggagtgcagtggcacaatcttggctcactgcaagctccgcctcccgggttcacgccattctcctgcgtcagcgtcctgagtagctgggactacaggcgcccgccaccaagcccggctaattttttgtatttttagtagagacggagtttcaccatgttagccaggatggtctcgatttcctgacctcgtgatcttcccgcctcggcctcccaaagtgctgggactgcaggcgtgagccaccaagcccggctgcaattttttttttttttttaagagatgagttctccttatgttgcccaggctggtttcacactccttgcctcaagtgattctcctgccttggcctcccaaagtgctgggattacaggcatgagccactgcaccttgcctactataaaccttaaatgatataacgtgttacagcagactgtgttaagagacctcatttgtacacctcaggtgttctttactgagaacacttcctattccttgcctttattctggctgcaggagcatggttggctcattccaaggcaaactggaagtctacaaaagtaatgcctcaaaaagcagtcccctatttagaatacctctgaggcatgttttacacgttttccagagttccccagcagaactgatgtccagtcgcccatagaagttgcttgcttgacagtacctctttccctttctttcctgaccgcatttctttgtccccttctagtaggtttcctgggatctcttttcaaataaattacttgtaccccaatttttgtctcacagtctacttctaagggaaaaataaggtgtgaaaagcacttagtattgtgtctggcacataatatattataataattattaatttcagaaacatatttaattcgttcttttttagaaaaagaaaccaaaagtgctatatttttgtaaaccactctcatggtagccacatcagttacagttatttttcattttctcttattgtttttaagaaatcattctttggctagtctcggtggctcacacctgtaatcccagcactttgggaggctgaggcggatggatcacctgaggtcaggagttcaagagcagcctggccaacatggtgaaacccagtctctgctaaagtacaaaaattagccgggtatggtggtgggtgcctgtaatcccagctacttgggaggctgaggcaggagaatctcttgaacctgggaggtggaggttgcagtgagccaaaatcgtgcctttgcactccaccctgggagatggagtgagactccatctcaaaaaaaaaaaaaaaatcattctttgaaaacttgttttctatttgaacagcaaaaccaggttcaacaagtgaatttgggcaatgactttacatgcactaatttttctgccttttaaaatacaattttctgacacctattttggtctggcagttcatctgaaaaataaaagcagaattttaaatgtgtaggtaagaaagattctattagtttccgacagcactgtagaaaaacaagagctctctatttcactaaaagcgctcagttccccctttttagcaaacactgaacattgatagtgtgttatgataaattaactacaatacctttggaggtcaagtgtctcagaaaaaagcaacagtaacatcttaggcaaaatggaaagcattagattcacacctgtaactcattaattttaaccaagagttagatttcacagaaagcaattactaggatggattgagttctttcatacacagggttgttttttttttaattgtaagactgttaaatattttctctgactatagttgccctcagcaatatccagaactagtggctatggattacttcattgtttctttctttggtaactgagaaaggtttaactatttattacaacgtttaaaaagttagattagaagaaaggatgcttccatctatttcatctttgtattctaaaagagtgtagctctactgtcagtggaataacagtgtgataaatgcactaattacatctgccatacaaagcttatatataaatccaaagtggacactgtgtgtgtgtgtgtgtgtgtgtgtgtgtgtgtgtgtgttttgagggtgtgcttgtgtgtgttcctgtctgagttttgcttctgtggttgttcatttgttaacagttatctgtttacaagctctttaaagatgaataacttagttattcaaacatgataaaatcgtgtttggtcgggtcttggtgttaaaatttacctgacctgactcttctcaaatgtctctctttacaaattccagtaactttattgctaagctataagaggaattttttagcttatttttgctttgagtctgtttttaactttctacaaataatttaatatcccttctctttgccttttcttaatgaagcagcatttctatgtgtctcctttcagggatgtatgtaaatgtagctatattgttgatagattaacataataatcaaatagaaattaacttcctgtgattcatcagtaaaactctatggacctacttttactcaaaattgttgctgtcaagcatttcaggtatgagttaattggctttctagaaaatgatagaggctatcctaaatctcaaagctcaatgatatctttttattttctgagatgccatttgtcaccatagcttattatacatgggctgattctcactccctggaaatagaaatgaagaaaggagctgtagggtcccctgccgccttctataaatgagcaaatcaaggaccagaatatctgtgggactcctccagaagctcttacagttacttacatagctaagtaagagcaaaggctggaagtagaacccacttttcccatagccaatccatttctcttttctaccaggtgtcttgtggcatttccccaggggactacatcttatctgctgtagtagaatcatgaaggtcatgaaatactggagctacaagagatttcggaggtctgctcccccccacccattttatacttcagaggaagaaactgagtacagagagttgggttgactaagaaattcatatagccaattggcgatctccttatagccattctaactttaaaaaggtggggattaaacctgctttcaaagcacaacctgaactgttccctcatccaagcttaagagagaatccatgacaccatataaaacagctctttatttccactggcaacaatggatgtatcctagttcatttgaacattttcctctctctatgatataggttagctggtttatttctatatccttgccaaaactggcagtgcatataggctgaaccatgcttgtggagaaaacactattcatatttcattatattaccttcagcagccctttactggcattatgactaaaacgcgtgtctccgagttgttgctggagaaatggccggccagtgaatttcgcgtcagaccagtgactattccagttgatatgaaagatgtcattactctgggggttatattgtggtcatcaggatattttctagtactcctggttcagaattttggagtattcatcttgaaaattgatgtctgtcctctattttggggggagattttctgtgtgctgtcttggctttctttgtttcctaggctataggtaagagttaagacgtacatgagtgtcttctagttaataaacctcactgccttctcacatggctgctgtacatacctgtcataacatgtatgtgatatactctctcccacacatacctatgcacacacagactcacacactctcacaagaagggaaatacataccattcttgccataatgttatttcatacatttgtgctttatttaacatttttcaatgcattagtattatgaactcttaaattaatgtaccaaagggcatttacataactttgaatatgttgattcaaaatcattacaaaatataatctaataagttacagagcctcattcaatgattccagttagcatccgcttctaagcgtgctattacttattcattagtagaagccctttaattttatattctgctcctggcagttgtggcttatttggtacttgttacagccactttagacaagtaaataaaaatcagatgaaaaatcctcagcaacagctggaaataaaccagtagtttctgtttgggtttggcagagtgaagcactgcagggctatgcatggaaaaataccagccagaactgttacacactgtgagaaaagattacatatctctagggttttggccttctaattactagggggtttctttgtccatgaagagtgccacctgcgtggttgggcaacaatataaaataattaaatcattatcacaagggtaatagtatacgtctttctggtttagctgtgataagaaaaccttaaacctgaaatacattaaacagtgtagaacatatgaaaagcctctttgagaggcttattcttgttgttatttaaaattttccttcactaatgtttagttcaaatacatgataattctagggaattacccgtctttatcagaccacccaaggaaggaagatgctctgccaataagtaaagccattggcctgtaagaacttgcttctgacttctaagtcacactcattttgataagcagatgtcttctaaaatgactgtgtggcttagcatactgagctgtttttctttccttttccaagacagtatggacatagttaaaaaaaaaaaaaaaagacgaaagattgttaagtacctgataatttcaataacatatttgtagtaactgcattgcagttaagccttatttaaagtaaattatctattttgcatccttttttttcaataaacagtttcacttctaagatgatgagggaaaaaagatgattaaggtttagcaatcttgttgcaagcttatttaaaattagttgtttaattatctacttcagatattattttgccaactggttatgttcatgccctgattaattattcttttcttccaagttatactcattttggaaaaatcaggtttagccatagcatgtgaagcccttaaaattgtctggagacagatatcttgatctcagaaacttaaattatcttaatactttctggagtaagaccaggaatggaagaagaagagagaaatatttctttatttttcctaattttatttcttctttcagcagaggaactgtactcttaaaattagagggtcagagcccttgctctgctgctgaatttatctcttacttgaggaattaggcacaatctaaacccagtactatttatttctccctttagaaattgaggaagttacctatggctaatatttttcaaatttatgtattttgtttgtttgtttgtttttttgggagatggagtctcactctgtcacccaggctggagtgcagtggcacaatctcggcccactgcaacctccgcctaccaggttcaagcaattctcctggctcagcctcctcagtagctgggaatacaggcacatgctgccatgcccggcaagttttttgtattttagtagagatggtctttcaccgtgttgccccggctggtctcaaactcctgagctcaggcaaaccacatgcctcggcctcccagagtgtgggattacaggcatgagccacattgcctggcctcaaatctacattttaaaaatattttaaaatagcgattttcaaacattaatatgatcagaatcacctgcagggcttgccaaactctagactgttggattccacctctagagtttctgattcggtaggtctgggatggatctcccaaatttgctttctaaaaagttcccaagagatgcggttgttgctagttcctgagatcacactgtgggaaccaaagccttacaataactagcctttttcatgagagaatggtaaggaaatataccacatatcaagagaagttatctcttgggttatcggaatgttagtaattttgtacttacccttttttcctctattctccatatgtcctacaagttatgtataatacatatatgattagaaaaaataatgaatgtttttggaagaacacttgttgaactagaaattcattaatctctattcattcttcccttctgatgtcttgtagcaatataataatgtcagttctcctcacctgctggggacagacactcctttcgatgtcttttgagggagctttcactcagcaaccaccagacagttgcttggttccttttagagtgctgtctttattgtgccagaatttagtacaagaggtgctggctctccaagatgagcaaatcccttaattgtatttcaaaaattctccccagttttttttctctctaccctcctcaggttacaatgctaaaagttctgtgtgggcctaaacactagtgggaaaaagcgcctggtgaacaaatgctgggtggcatgcccactcagacataaagaagttctgctcacccttttgggagtgtactcatttttgagaaatttgcctcacttagagctccttaaaataaatcaaacaaaattatatataaaatatatgctttcacaatttcagccatttcttttggtgtttctcttctaataaccttctaaacgttgttgctttatgtttttatctcagatttttgaaaacaaactaaatatagcaccctaaaaaacctttcaaatattttggattcttttatttatgactcttacaagcatgtgagggggcttgtttagagagaataaaggttataacctggtctgtctgttgagacagtgattttaatcacatttaattcccattcactctgtatgttacttgatccactcattggtttaaaagcatattgataaatacagccatggcttagcctcttgcccttcatcccgtctagagttgcatccaggcttaagtgagtttgccacatttagatgtcatactttgttactgatgagatccttgctagatagtggagcctatgtttttctagagaaaagtccatattccattataaagataaataaataatttgtttcagaaggctttcaagatgttggcttatagtcaaactataagtaacagcttgaaaaacctcagtgcttctcacatacatgttaatggctgttctccttcataaatactttgaagtgtttcagtaaatattttcctaaagaactttaacttatttgctaacttattgagtatcaaaatgtatgttgtatatgacactatgctaggcatatatatacaatattatccataatttttctaaatttttttgcaaatcagataaatttttattttaagattcagggggtacataagtaattgttacatgagtgtattgtgtgatgctgaggtttgggcttctaatgatcccatcacccaagtagcgaacatagaacctgataggtaatttttcaacccttgtcaccagccctcgatttctccctcctctttttggaatccccagtgtttattgtccccatctttctgtctatgcatacccagtgtttagctcccacttataagtgagaacgtgcgatttttggttttctcttcctgcattaattgacgtagtgtaatggcctccagttgcatccatgttgctgcaaaggacatgattttgttcttttttttaatggctgtgtagtattccatggtacatatgtaccacatttcctttatctaatctaccattgatgggcactgggttgattctgtctttgctattgtgaatagtgctggggtaaaaatacaagtgcaggtatgcttttgggagaacaattcattttcctgtgggtatatactcagtaatgggattgctgagtcaactggtaattctgtttctagttctttgagagatctccaaatggctttctacaggggctgaactaatttgcactccagccaccagtgtgtaagtgttctgttttctctgcaatcttgtcaacatccatgattttctgactttttattactagccattctgactggtgtgagatcctatctcgttgtggttttgatttgcatctctcgacatttagtgattttgagcgttttttcatatgtttgtttgccacttatatgtctccttttcagaactgtctgttcatgtccttggcccactttgtaatggggttatttgtttttttcttattgagttgtttaagttccttatggattctggatattagacctttatcacatgcatactttgcaaatattttctcccattctataggttgtctgtttactgtgttgatagtttcttttgctctgcagaagctctgtagtttaattaggtctcaattgtcaattttcggttttgttgcatttgcttttgaagatttatcataaatcccttgctgaggccaaggtctagaagggtttttcctaggttttcttctaggtagagcaaaactttaaatacacatttaaaaaatatattttcttcagaaaccaggatgcaaaagaaatttccaatattcctatattttattaataaatgtatgaatttgagcaatgaaagaaaacatctcaattcttttcaaaaaacacattttccttctttttggtgttgtaataatatgctcccaagtgacatggaagtgactacttctactggtcatcagtggtaggatgggagggtaccaaatctggcagcaaagaagtttacaaatcatattgtaaaaaataagcaattgtgagaaacggttattgcaataagttccagaaatcattatggacttccataaatcattaaactccatagcaaacttaagtacattttagttggattggattctggttcagaaagctaaaaaggacattgctgggacaattggcaaagttctaaaaagaactaaaaaaagatgatagaactgtaccaacatccgtggaacagaatagagaacccagtaataaggccacacacctacaacaatctgatcttcaacaaacctgacaataacacacagtagggaaagaatttatttaataaatggtgctgcgataactggctagccatatgcagaagattgaaattggaccccttcctttcaccatatacaaaaattaactcaaaatggattagagacttcaatgtaaaacccaaaactgtaaaaaccctggaggaaaacctaggcaataccattttggacatagaaacaggaaaatattttatgacgaagacatcaaaagcaattgcaacaaaagcaacacttgacaaatgtgagctaattaaactaaaggccttctgtacagcaaaggaaactgtcaacagaatgaacagacaacctacagaatgggagaaaatgtttgcaaactatgcatctgacaaaggtctaataatcagcatctataaggaacttaaacaaatttacaagggaaaaacaaccccattacaaattaggcaaaggacatgaacagacacttttcagaagaagacatacatctgaacaacaatcatatgaataaaagctcaacaatactgatcattagagacatacaaatgaaaaccacaatgagataccatctcacaccagtcagaatggatattattaaaaagtcaaaatacaacagatgctggcaagattgtggagaaatacactgttgatgagagtgtagatagtgtagattattttaaccattgtggaagatggtgtggtgattcctcaaagacctaaaaacagaaataccatttgacccagcaatcccattactgggcatatactcaaaggaatataaatcattcttttatgaagacacatgcacacatatgttcattacactactattcataatagcaaacacatggaatcaacctaaatgcccatcagtggtagactcgataaagaaaatgtggtatatatataccatggaatactatgcagccataaaaagaatgggaccatgttctttgtaggacagggatggaggtggaagccattatccttagcaaactaacacaggaacagaaaaccaaatgccacaggttctgacttctaagtgggagctaaatgataagaacacatggatacatgggggaacaacacacacaggggcttattggagggtggagggtgggaggagggaaaggatcaggaaaaataatgaatggatactaggcttaatatctggatgatgaaataatctgtacaacaaacccctctgacataggtttacctatataacaaacctgcacatgtacccctgaacttaaatgttaaatgaaaacataataaaaataaaacagggatgtatacacacacacacacacacacacacacacacacacacatgcacacatatatatatataaaatgatgtgcatatataatggtcatatatatatgaggtaaaatattaacaattgagaaatctggatgaaggagatatggagatataggagttctttatactggctttgcaaattttttaaaagtttgaaagtattttaaaaataaattatgtaaagggatcataccatatgtagttacgcattaattgtcacaatgtttctctgattatttacatcatggcatttagctttacagttaaactatttgtacaaactcttggtcatataacattctgagaagacaattaattttggctttgaataaataaaacactagaagaattgttttctccttaccactttgtgtcttatggccattaacaaaaaatactgatagattgactttactttttatgactcttttagttttctagttctagaacgtatattacaattttaagatctaattaaagcactttatcgcatacagtattgtctctttttttcactgttgaacaacatatttttaattttgaaattcttcttttccattactaatggtaagaattagatgattgttggttttacaaaaatcacaatagatggaaaagaaaacactgtattttctcacatgtgcatcaaataccagggttttggctcataaatcagaagagcacaaaaagatacaactggagtccttcctagttccactgttacagccaaaatgctgacattcaggcatatttccaagacccacgtttcggtaagcccttatgtgcttcgagtgggctgaaaagaatgtgaaataatttcacatggcaccttttacagaaggctgtgtgaggaacacaacattctctttgaaagagaaagtcatctttgtaataataaccattggttgctttcttttttttaggcatgtaataacattagaagatttactttggaacttgtttggaccattatcaacacgttagttttggtgacaaaatttgcatttactactgtagagctgtaatacctgaaagatgcaccatcctgacttgggactaagagcagctctcaacctcttttattcccctcaaaaccaacaccagtgcacaagtacctctgatattagataaaataatgaagctcacagtaattataatgcctattattttatcagcatctaccacgttctaagtgccttacattcttgatccaaactaatcttcaaaaccatccttaaagaaaaaaacttttcatgttacaaataaggaaactgaggcccaaaagagctaagcagcttgcctagcatcaaaatagtattgatggacaagaaattcacctgttctatgtcactctggaacctgtgcttttttcacaaaacctgtctgaagttagaggggtaacaaatggttactagcatggctaagagaagttacatgtggacagcactcggatttcaactagttggcagattatgcttgcttcagtggggtgggaaaactgacaaatcctctgacattagggcaaagaactttgttagatgtcatcattattacaggtgactctgatgccattttattaaaggctgtatcttctttctgtttctatctacaatgcttagtggtacacaacgcatgacaggtgcctaggaagtctttgttaaataaaagagtgaatgaaatatgtaatagagtaacttattgaatggcagcttaatggccttagtgaccagaattaactggtcaagagttaggggggtattgccagttaagatttcaagaacagttttttttttttaactgcagtatgggtgaagaagggtgaagtagaaaagtttacaaagaattaagaactgattttgaaaaatgataagccctgacctaatgaattacattttaaagcattctttagttatggaataggaatatataaaagcagtgattatcttcttttttcttcactgtttccaattggttgtattttttttttctctcctcagctggaaatgcctaggttccacagttacaatgtctgctgattttatattacttaagtcttgtagttttttcctttaattgtgaagccattcttacctaagttcaatcatattggaataattttcatactcctaaattagtatattagaattttttttcctcaacctatctttactagcataattaacttacatatatccatcctttagatttcgttttcttccacagtcactggaaggtggttcaaattctccagggcacttttatcttcccattcaaaacatgtccatttacattctccctggattgtgaagcattatgcactccatatgaatgtggaggcaccattttcttctgcctcctagtaataaactgctgtttttcatcagttttaatatttactttcaacagaaactgtcaagattgccattatactatttgctaataggaggcctgccctttttaaatatgctttttaaaaaaacccagattccttttctacagggccgaaattaaagcaggttatgaccatggcccgtgaggcatggttttatgactctgctgaaatctcagcctcctgctcctccccttgagggataagaagcaaatatgctttggtaagattgatgaagcaatgatatccccaagtatattcctattaagttccggtttcacagaacttacaacagggtaaaacccccaaataataactttctccagatatttatgatacatagtttataaattattacctagcaaaaatactcttgtatacaaataatcagtattttcttcaaagagagcatatttctggattaatttctgaaaacattcttagcagggaagtttccagaaagttggggactttctgtatcccttgacttttgatttctgtgcgacagagctcagtagtaaattgtccttaccatccctcatttaccttctaaggtactgagtcattgtagaatatttttaacatcttgtgtttccagacattgcttcatttgcaaacttaagaacatttaaatatttaagagtatttattttttaaaacagagatttcatacaagtgacacagctaagtccaaacactgtattatttatgtccccagcgcttgactttttgagtttcttttcttaatatttcagttctagagatttcatgtgatatactagataccaattactaaagtgttgttcagagagcagagggttaaaatgttttcttagtgaattctttaaaaactgtagctgtggaagcaggattgctcttgtttcatcctgacaggaatggtagatttaataggttccccagagctttttatcgcattataactctttctgtgatggtcagttttgggtccacattatgtgacctgactttcaacttgtttgaactgctgtcaggctgcagaggaactgaaggctactagatagtcctgtagttttccagttgggaaaacaacaatcctgcctgaaaacttctgacaagatccaatactgttcttcttatagcaaaactgagtcagcctgatacctggaaaaatctttacctgctcaaagtaaagcagtgtggccagaatgccttatcgtaatgtaaatctgtgttgctttgctctataataacagcttgtctatctcttgtgatcattcattccctgaggttgaaactattatcatgtcagcagagctcccttctcagttagcttgcattgctagccagcactcctgtataaatcttgatgtctcctaaatgttctccctagatccagtgtgtggtatttaaattaaggaagctcagacatgtcttgaaaggaactgaagtattgcatttagtcttgccaatccactgattaaaattcttgccaagtgttacattatgcacagcttccttattttggctgtaaatttcattgcatatttttctaggatgagaaagtttgtactttttatttcataagcccacataataaacacagctttcttcaaaaccgtttgaggtgttggatgcgtgtgctgtgttaaatatagggctcctttgtggaggaaagcacatgtggctcattttaacttcacacacaagcattttagacggggcaaaatggttctgctgggtaaaaagaaaatagacatttcgatgagctgcaggattatccaagccatagctttatcctctctgaaatctcttctatgcacttgaagaatgaacaaaactttctttatggacacagaagaacccactctcttctctcctatagccactgccactcattctgcccctgtattttaaatttttagtgggtgagtatgtgaatcgaaagctctcagagctggggggtggtggctcacacctatgatcctagcactttggaaggccaaggcaggcagatctcttgagttcaagaccagcctgggcaacatggcaagaccctgtatctacaaaaaatacaaatatttgctgggcatcatggtgccctcctatagtcctagctacttgctactcggggactgaggcaggaggatgacttgacctcaggagtttgaggctgcagtgagctatgattgcaccactacactttagcctgggcaacagagtgagaccctgtctcttaaaaaaaaaaaaggctctcacttttcactaaataaatgcttctctagcataaaactttgtgtagcgtcctttcagctaccattctgaagagaaaaccccaatgtcttagagagggaacaaatagatttagagggagattagcagaagccataaaatgcatactttggacccaatgactgggcctgcatttggaataaggggtagaaaactggataattcgctccatttacttctgtaaatgtatttttctttggtagcagccttgcaggagaagggcatctttgaaggtctggaggtggggctccactgacattcaaataacgcaggcctagggtacagggactgaaagctcactgcacttttgattcggattgggatcctcccataggttccattggcaaatgactactttcttaacaaaaagaaatagttctataattaatttttcttaaggaaaatcatatctcaacctattaatttagaaatattttaaatgagtacatggggatacaaatttagttatacaaatcacatgtgacactgttcatgctgttcgtatttcagtatagattaaaattttttaatgctaaaaagagcttttcttgctcttagagttttttttcatgcacatttccatgaaaatttagaagttatgagggcaaaatcttcatctatacacaaacacttttttttaaacaaaaaggagtaaaatttcatcaacattatgaactatgagccctattgaataattttttcctgtaaaaaacagaatcaagttatgaaatgaagaaaataattaggtctttgctaaaacttagtctttattaagcccaactttttcttaatcagaaaaagatgtcaaaaggaataattgtattgcttgacaaagtgatcaagatgttttctgctcctaagttatttcttcatgtgacaatcattccttaaagctcctcttaataaataatggaaagaaagaaagttgatgtttggattggggcaataaatgtcatctttatgtgtgtagtttggagaaacgggcttcttgtttgccatctcctctccagagttacagatacagtgtcattggtccttttaaaagtatggaaagcagagtgaatggcaaaaggtttgccaaaacagattatcttttgtatgcgtcaagattttatatttttgcaaatatacatacacagacaggcttttcaaaaccattttccttcagacatccaagtaaaagttcagagtgatttcttttttgctccttaatatttttaatcctttatcatcttacctaaagccatttagtatttcctggagcagatggggtataagccataaaatgacatatttacttctttgtaggaagaaaattaggagaagagattctataacacgattgaagtttaaaagctaaattccttgaggaaagattatctttctccatagatctcattctctgataaaacaaatgaggttgtctcagaggcacctgttaatattgacctacatcatccctagttctgaccttgtgtccccagccactgggaagtttttggtagaaaaggaactattaagttggttcgtttcttatttcttggaaagagaaaggtctccctccccttgcacttctgcttgatctggtctctgaaggagacttccacagaaacaagggcacaatctgtgccttgcaactacgcctatcatttcctctttacttaaggtcaaaatttccattactgcttagactctattaataatgggtttgaagattattttggggaattattccttcaaggaatatagtgttaggacctgcgccttgagaagggtctctgcctggatggaggaacgaggatgctcttgagaaagaactgaattgtgaattttttcttttcaagtaaatttcccagttgttttaaaaaaaggtatgttgccgagcttttgaggaactcttcagaataccagagatgtcttcaatttaataacatcttacagcaccgttttcaccagctagtatatcctttgcctgaaaatccctgtcatctacgatgatgaatttactcctcattcagactgtctctctgaaataccagaaaaatatgatcttcattctcctctctggaccctttagtagtacctaacatgagtaaattcagcctcattgttgatggaaatatcccttcctggtgaaaactgacagaatctaagcaatcttaaggtcccatggctaccagtctggcacattctaggtttttccagctgccatttcttctttagtggtgtggtcagttctcctctggccccttcagtgaactgtttggggttttacccactctggcattgtctttacaatgtttcgtcagatcagaatttcccagtaatttaacacttctgtaatgaccaaagagaaatttcttatccagaatgtcaaggaatatgtctcagataaatgagatgtatgcctacaacatttcaaaatggcatcaggcttcaagttacagaaacaccatccacatcctaggtagtgacttacacaaaacacaaagtcattttttaaagaaaacaactgttttctctcattgaatgagaagtagttcagggctaatgtgactccttcacagatgatgtcagagattgagacacctcccaactgttctttctaccacaccatagtgtagtcagcacgcccatgttgactagatggctgctgaagtcttacccccatgtggttagtcttaggcaggaaggtggatgagtaggaaatcaataataataaataataaataaataacaaagatctgctatggaagtaagccctctgtaataagcttgcctggaagccccacctaatggcatccacctccatctaaattggtcactcatctctttttcatctttgaaagagatgctgataaatgtacattctaaattgggcatatagcctgcccactaatatagggattctgttaccagggaaaatgagaattgatagtgggtaggcaaccaccaatctatgtcataatgacattttctttgatttagaatttctttttaaattgggatcatgcgtatgtggaagaaaatgcatgaactaggtcttaaaatattttgtttactatgaatttagcatctgaaaaatacatctttaacatactctgggcaggattttaatgagcttgacttttttgctctcagacctaatgatgagatataggtcattgtttcatatttttccaagagattttaagggtctactgtaaacatttatgagaaacattttttttctcatttgctatttcaagttcagaaagaggaatgaaagtcactgtttcttgggtatctgcatattatttagatcttagagtctaggagagagaagcatctcttggtttttaaagatcagtccctacgtttttggatttgagatgaagaatgctagtgtgtgatctgtaactaaaaactgctccagtttcctgatgtgtaaatatttattctattatacttatcatcttctcctaggatcacggcccaaatctcatcttcaaattgaccaacaagatgaggaggttcataacaagttattttttaagtcagcccaaggcaggctcaaataaattaaccaaattcctcacatctgtgaagcttcaagatgtggatctccttgtcattgcattgtattttcttagagatgtttcttctgctccctaaaggaaacactgatgctattcagtacctgacacatgaatctttcatgcaggctataggtgacctctaatggaatccactttttacctgattacttcagctatattgtttttcctccccaaggggttaggacagctatttaaccttattgttttgtgtcttcctttgagagtggcttcttgctttgtatcccttctgatgaggatgatgatgatgatgaatatctgtgtaacaaaccacttccaaagtttagtgacttaaaacaacagctatttaattattgattctatgggttcactgtaaagctggacagttctttttctgttatctggcctcactcatatgtctggtcagttgccaggaaagctgaatgctggctagtctaagttggcctccgctgagatggcttaatcctgttccatataatctctcatccttcagctagctgatctggactagttcacatgggagctaagcagagttctaagagagtgagcagaaatgtgaaaggcctcttgagacttaggacgagtactggcacagagtcacttttgcctcattctattgaccaaagcaagtcatgagattagcctagattcaagtggtagggaaacagattgtatctcttgatggcaggagctgcagagtcatatggccaagggcatggatacaaagaaagaagtaattgctgcaacctttatgaaaggtctaccacattaagattcttcgagcacttattcaggcactgtatgagctaagcactgtacatgttatctcattcaattctcataagaactctacaaggttgatactaatattatacccattacatagatgcaaaaattctaagcgacagagactggcattttgattttaaagcccttttaattaccagatctgtggactccaaatgttcttgattgtatagttctctcagtacaaatattttgaacatgtacttatatgtatgtgtatgtttgcttataaattacatacaagtactactgtcatctatatattaaatattaataaacttgaacttcattcttatctttttagataaaaattataaatatcaactaaagtttcagtgcattttttcatcctttatatgaatgtcttgtagcctcactttggagaccatgcatcaagcggctccttatgcccaagatatttcatgattcccatgtatagcgttaagtgaaacactgtttaattgaaatcctacttgtcattgagttcagttccagttccagttaatattgcttgctttcaatgcagacttttaagggtggggactcttcctttttggatatttgattaggacttgcggaggagcgtgagagcaaggctttaattaaatttagagaggctcttttgatttatgagagtcaggactcatggtttcatgtgtccagtgaatactcagatcacttaacacagggcccaattgctcatcactttctggagctgtgtcaataaaacaagataacgtggaggaatgcttctcaaagttctcagttggcagtgtgtgtctctgttatctgcagagattacgaaatgcagactctgggtttccatggctggagagactgattttacagatttgaggctgggtatgggaatctgcatttttactaggctcgcttggtgacattgaccacaattatagggccataaaatctgaattcatatctgccacttaggtggatgaccttagataagtaatctattcttgaacttgttgaatttcttcaactataaaatggaaaaggtggctgggcacagtggctcacacctgtaatcccagcactttgggaggctgaagcaggtggatcacttgaggtgaggagttcgacactagcctgaccaacatggtaaaaccccatctttactaaaaaaacaaaaaattagctgggtgtggtggtgggcgcctgtaatctcagctactcgggaggctgaggcaggagaattgcttgaacctgggaggtggaggttgcagtgagccaagatcgtgccactgcactccagcctgggcaacaagagtgaaactccatctcaaaaaaaaaaaaaaaaaaaggaaaaggtaataaagctcaagaccaccttgcaaaatattttgcaaattaaatttgtgataattttgtcaaagtgctttataaaatgtaatacattaatatgtgacccattccctaaaatgttgtcaatctattaaaagatgtattctccatactaaggtattcggtatattgtaaattacttttaatttcaatgaaaacgtgattctgagcttctctgccctattcatttgggtcccaaggaaagagactatggtttatatttcctttcttctctgcatgaatggaggtagaagacagtagggatttataacagactttaagttcaggcaaacatgggctctgaccccagcttctacattatcttgcagtgattacttaacttccacctgtttatttattaagtagtgatcctaatgaattcttcctttcaaaatttttatcatgattttatcatgattaaatgagatatagccaaaatttattgcatacttgctgcgtgccagacattattcaaagtgcttgtcagtttactcacgaaaatcctataattttgagtggaggtcctatgagggatcccattttaaagatgagaaaatcaagaaaaagagatttaaatggtggcactaggattcaaatctctgctgtctgacaccttaaccatcctctttctacttcgtaacactacctctaaaaagtgaaagctttcaagtcacttagcacaccagtgggcacacagcacatcttcaaaatatgtgacattattattgttgttgttaatattattatttgatttccccacagcttcatgcagaatgctttgtgcaaggtagttgtttaacaaatttatggtaattcgatttttaaagaaccctgttgtatcctcttgggcttctgagagatacatattcaatgagcgaagcctcttactttttaggctaatatgatttatgcagctgcttttagattaagttaccatcttttatttacaaaaaaagattaaataaatatgtgaaaatccaagaactccaaaatctccctgtgaaaatccaagaattccaaaatttcccttgctaaaaactgtttagaaaatcatctttgtaagacaagaaggagacaaagaccaaacctacttttgattggtgtacctgaaagtgatggggagaatagaaccaagttggaaagcactcttcaggatattatccaggagaacttccccaaactagaaagacaggccaacattcaaattcaggaaatacagggaacaccacaaagatactccttgagaagagcaaccacaagacacataatcgtcagattcgccaaggttgaaatgaaggaaaaaatattaaatgcagccagagagaaaggtcaggttacccacaaagggaagcccatcagactaacagcagatctctctgaagaaaccctacaagccagaagagagtgggggccgatattcaacattcttatagaaaagaattttcaacccagagtttcatatccagccaaactaagcttcataagtgaaggagaaataaaatcctttacagacaagcggaggctgagagattttgtcaccaccaggcctgcgttacaagagctcctgaaggaagcactaaatatggaaaggaaaaatcggtaccagccactgcaaaaacataccaaattgtaaagaccatcaacactatgaagaaactgcatcaacaaatgggcaaaataaccagctagcatcataatgacaggatcaaattcacacataacaatattaaccttaaatataaacaggctaaatgccccaattaaaagacacaggcaaattggatagagtcaagaccctttggtgtgctgtgttcaggagacccatctcatgtgcaaagacacacataggctcaaaataaagggatggaggaagatttaccaaacaaatggaaagccaaaaaaaagcaagggttgcaatcctagtctctgataaagcagactttaaaccaacaaagattaaaaaaaagacaaaggcattacataatggtaaagggatcaatgcaacaagaagagctaactatcctaaatatatatgcacccaatacaggtgtgccaaggttcataaagcaagttcttagagacctacaaagagacttagactcccacacaacaatagtgggagactttaacaccccactgtcaatattagacagatcaatgagacagaaaattaacaaggatattcaggacttgaactcagctgtggaccaaacggacctaatagacatctacagaactctccactccaaatcaacagaatatacattcttttcagcaccacatcatgcttattctaacatacatccacaacacacttattccacataatttagaagtaaaatactcctcagcaaatgcaaaagaacggaaatcataacaaactgtctctcagaccacagtgcaatcaaattagaactcaggattaagaaactcactcaaaaccgcacaactacatggaaactgaacaagctgttcctgaatgactactgggtaaataacgaaattaaggcagaaataaataaattctttgaaaccaatgagaacaaagacacaacataccagaatctctgagacacagctaaagcagtgtttagagggaaatttatagcactaaatgcccacaggagaaagtgtgaaagatctaaaatcgacaccctaacatcacaaataaaagtactagagaagtaagagcaaacaaattcaaaagctagcagaagacaagaattaactaacatcagagcagaactgaaggagatagagtcatgaaaaactcttcaaaaaatcaatgaattcaggagctggatttttgaagagattaacaaaatagatagaccactagccagactaataaagaagaaaagagagaagaatcaaatagatacaataaaaaacgataaaggggatatcaccactgatcccatagaaataaaaactaccacagggccaatttctaaaataactggatttcactaaatggtgcatttagtgtttttcaaaatctgtatttagaactttgtcttggttctcttttatttttattttctgatagctctacattcattactgtacagtacctgatacgtttctgctcaatgctttgcagcttgttttttctcttttcaggatcaacttgttcatttgcttataaaatgatgagctttacctgaggaatgccagagaggcagattggactctctggggcaaaataatcttaagttaaaaaaaaattgaggtgttttcatgtcctatttcttttgcctttatttaagctatctaaacagtggaataagactattctataataacatcttcaaactctaagctccaaggtaatatgaacaaaagtgacaacaattcccctcaagcataactgaaacttatctttctatcccgctctcagacagtggaattctttaggctatagtctaaggaaagctaaccaagatagcctaattaataggctgaagtcctctgaatttagcctttgctagataattggagaaaatatgtcagggagtcaaaatccttgccttagttaaccatctgcctgcaagcattttggccttcttatcagggtggtaaatgacaggtatgtcagtacagcagaaagcctagcctttagaaggagctgcagctagactcccctcagtcctgacgaagagcagccctgtgagtgacctcagtgttcaccccaatactagctgaccttaccacaggcagtctttaataagtctctgttttaatcttctgttagtctggtttcagtcactaagtaggaggaacagctatttcaatgagtaggagagcttggctttgggtactcaccgagtcttcagactccagcatgattaaggactctgagacatacctagggcaatgagcttggccaatacattcattctagtaataaaagctgatttttttgcacaagtttaaaaaaaacagtgatccagtggaacaaaaattgccatcatgatatttacaacagaaatgaatgtatttgttaaggcaaactggtgttgcaaacatccccaaattgtagtggttctacataataaaggtttatcacctgattcacagtctagtatgggaagtgggagtggagctgtgttccacacagtcatttagggactcagacactttttgtctggttgctgcaccatctcctgggtcattggtgtcctgcctgagcccctgcattcagcctgcagacaatggaaggtcatatggaggaccttgtgcaggatttttatggactggatgtagaaatagttatatcacttttactcatactctttaaacaggactcagtctcacaaccccctaaaattacaagagtgtttgggaagtactgtcttgctcatgtagcccaggaataaaaccaaatgggctttggtgaacaaacagcagactagccacagtggtcttgaaaaattctatatattgtggttctatttactgatggagcttagttgtcttttttcctataatatatatatttttggtatgataagaagcatagacagtcctattgctctctagaagattgtattccacttttttccctcttttagatttctgatcttgggttctattcttttcttctttagtggtgattaggtttagatgatctctgtcagcccgagtacaaactatgggtctcctccccatctgcctccccagggtagatgtgagaagtgctactgtgttgtattccacatcttgccactattcagcctgctgtctttttattctgaccctttgtgaagtcaaaaggcaaggttttctgcagattgaactagacctgagtggagaagggggtgaactttcagattcaatgaattataacacttctaatatagaacctcatcaccagatttgtgatgacaacactagctgtgtatttgactttactttttactttctaattccttggatttgagtaacctaaccatttcctcagtattatcagaaaaaaaaaaacaacacattacttttcctcccacatttaattgaatcaaaatcaactgtattaagcagttacagagtcatttattaagataggtggggatatacaaaagaataagccacctcctgcttcttcaagaaactgagagtaaggtgggaaacagacttttagcatataagcattctgctgtgtttatgtaatagctataaaacagtttataaatatgacaataagggtgcaaaccagaatatgatgggaacataaagagacatttattttgtccagttgtaaatggtttcttaaaagagaaaacatttgaaatagaaattgaaaaatgggaaagacctcgctaggcagaaaaggagagggaatagaaagcctgggtagagggtaccgtgcaaaggacgtcatggtgcctttagagaacagcaaggtcatgggtgtggccaaatcagaggatgtgaagggagaaagtgtaggaggatatgagagttgggaggataagttggaacaacatttatgaagggtctaaacaccttaatttggaattagtgttttacaatgtaagatatgaagaacaacaaacatgactttaatagagaagcagtaagatcagactcacattttataaaaataagtctagcaacagaattgacaatagattagagaattttaaactcttatattgagtttgtacatataggggtattacctttttgtctttcaaagacttgcttttgagcatagaattgatacaattgatattaccattgcccttttctcccacacgctttttttcaagtgccacaaatatagctctgaaataataggagatcatattttaattgaaagtgtggtatgtagttccattgttctataatgaaagactaacatgtatcagatgaccttcataccaatagtaactaggaattcttgacaaaatataagcaacaacagaaattgtttattggcactagcaagtaacttaaaataggctgaaataagagagattctatttgtgacataaggaaccacactgagtgagagccacatttaagagatcatgtgacttggaccctgagggtcctacttaactcatatggtaagtggctgagagggctgaaatagaaagcaatagttattcacatgggaaaccacaggactgaattcaggattgtcagaataggaattaaggaggagatgccagaaaggagagagtcacagatgaaggagcccaaaatctacaaataaatccctcttgaatccttggttgagtctatgcatatgcagagaaagactctaagaagcctaggaagaaaatgaaagctagaaggtgtaaataactgagaaaataattcagcagcttcttaactgtatgtctatagaatttggaattttagttctccccaagttagagggggcttggctaacatcttgggttttccgctgaaactccagaagggctatgcggtaggagtaaagactacatcctggcattaagggatttatcatagaacttaagaaaaaattgaaatagacccaccttaacgaaacgtccatattacttggcagtattttacctgcctgctagaacaaacttctaagataatagaatcttctaagataatagaagataatagaatctaaagcctctaccatatattatacacaagtttcaatatgccatcagtaatttactagacatgcaaagaaataagaaaatgtattccagagtcaaatgaaaaatgagtcaatacagacagacccatagctgacctagataatggaattggcacatagggacattaaaataactatgtcacatctgttaaggaatttacatgactagataaaatagaatggatgaggagatgggaaatttcaggagtcataggaaaacagtaagaagaagaaccaaatggaaatttcaagaatgaaaaaaatgaaatatttgaaactttaaaaagtgaaatggaattaataacagatttatcacaactcagtaataaaaagacaacaaaaattagcaaaagacatgagcagatacttccaaaaataagatatatgaatggccagtatacatttggcaagacatctagcattattaattatcagggaaatgtgcattgaatactcctttatagtcattagaattaccaacattaaaaaggctgacgacaacaagggactgccaaaatttgaactctcttacattgctggggttatgtgtaacatggtaatcactggggaaaactgttatgttagttctttataaaataaatatgtacttacctagtaatttcactcaatgatatttgtccaatggaaatgaaaacgtatagctacaagatggtttatacaagtatgcagattgattcataatagctaaaaactagaaacagtctaatgtctattcacagatgaatggataaagaaattacagcatattcaacaatggagtattacaaataaaaaggaagaagtctaaatatatacaacacaggtgaatctcagaaatatttaatatgtggagtaaaagaaggcagtctctctatctttatataaagtttgaagttatatagcaggtaaaacagttctggtgatcaaagtcagaacaggaactccctctgggtgaggggaggggaaattgaatggaaagggcacaaggtagctttttgggttcagggaaaggttttgtatctttattagcatcatggttacataaatgcacacagttgttaaaagttgtcaaaactgcacacttaaaatctgtacatttgattgtgtgtacattataagtcataaatagaatggatgggaatttaaaagtaatgtaatagagtgcttcgatatgccacatgcaggaattgagaagacagtgattaataatggttaagagcatggttgcaatatcagataaatctggggttttgaatcacgtcgtgagtactttgtgaatgtaagcaagttactaacctaagatcctaggaaatggagatgataaaattaatatttaccttataaggttgtccttagtgcagtgcccagcacattgatgcatttggtacatttaagctgtagttattattattaaatagctcttcagctagactttcactgcccgagtgcagtcaggaatactgggataaccatgaaaattttgagaattagatatctgcaaactgcattaaggagcaatctaaataatgcaggtaatatttgacagcatatgattaagtatactaggaaatcctattttcattatctatttgaaagcaactaattacctctttgccaagaaaacgtttactttaaaatacttttcttaaagctcttgtaaaaaattttcatatatagagaaattaggacttaatttttcccttatacagtaatctcaccctctgtttcccatctcataataatatcaccaactgctgcatatattttcagtacatatatatatgtgtgtgtgctgaatatatatatacacattacatatatatattacattacatatatatatccatatatatgtatattcagtacatatatatatgtacgtgtgtgtatataatgttgtaaacaaaatggtaaccatactatatgtacttttctaaacctggcattttcactgagaaatcttttcatttgaaggactctgtttacctatagctggtctattcattttaagtggtgtattacagtctatggcattgatgggcttttatttatttaaccagctcctgttgatggacatctgagtagatccaagttttcactattgtaaacaactgtgacatccttgtatacgtattttttgcacttgtgttaataatttcatgtaataaatttaaaaagtaaaaatgctaattgaaagaattttaacaaaatatattaatgtttctttgtaagagaaaaaactttatttttatttatttattttttttgagacggagtttcactcttgttgcccaggctggagtgcaatggcacgatcttggctcactgcaacctccgcctcctaggttcaagcaattctcctgcctcagcctcctgagtagccaggattacaggcatgcaccaccacacccggctaattttgtatttttagtagagacggggtttctccatgttggtcaggctggtctcgaacatctgacctcaggtgatccgcccgcctcagcctcctaaagtgctgggattacaggcatgagccactgtgcccggcctttatttcttctttttaaataaagaagaattatttcaaaatttacacaaaatttgatttagagtacttaagataactaccaccaaagggacacataacactgtactagacactatgctgaatgccttccatgcacaaaattattcaaattttatgcacaactttgtaactgtgtgagatactaccattattgacaaggacttgtaagaaaaccagtgcttggagcatgccatatctggtaaatgtttaagtctggatttcaacctagattttgcaaaacatgcagtgtagcgtagtctggagtgaatttatttttttgtgagtgtctttgaggttgaggatcattgtcaaactttggtgatatgcaagtggtgaagtaataaagcccagataatgttgtttccctggaacacttgtgaggccaaaagtgatgcctccctgccatgcagtggcagcagaagtcaacctggacattagacaagttatacttcccttagtgccaatagcctgtcccatatccagcttcgtcttaaataataataatgataatgataataaagatcaaggatcaattacatggtgttatggactgtggagaggagaagtcttcagacctctaatattctatctattttcacattccagttactactactctctcttttcctttattttataatcttgctttttttttctatccaaggggcccattcaataataactaaagccccaaatcctcaatttcctaatttatgtgtctgtgatcttttagtcttctacccttctacctgtgcactcacacacagagaactttaatttccagcgacatcaaatttgtgctctcaaaaggtaatttgtgatgcctggatgtcaaaggcgcccagatgtaaagctagagagctgatgagacctgaggctggtcacgggcacaaagcctgcccttctggcagagtcggagcagcactgaagttctgcttcaggccgtgccaagtgagagtaaggggtggtcttatgggtgttaagcaagacctaatctacccttgcgcagcacccagtcagacaccctgcagaaacacaatcatgtgtgtgtcattctgttgtggggagaagttgctcaaaggtttggttttgattttggtagctttaattctactccttcagttttgaggtgagcacaaatgtttcagagtacctttctaggtttcttactgacttttttcttctctaacctgtggtgtgttagaggcaacatgtaccagctcgggaaagagagacaattgtgagcatttcttctcaaccctgtgttcagtgacatcaagttaatagcttaaaattggatatggggaaaggaattataccactgaaatggaaaaatgctacatatcaaggattctcccaccccagagaacctgttgtttaactagcacacaacttctataacccttctacttctgttcaccacataacctcaccccccccccccggcccccgccaacacacacacaaacaagctagtgtttgaaacattggacaccctgggttttcttccacgggctatggttatttacaggaagaacaaattgagttctcttcctcttcccatcttgagctttatatttatttccaaatgccaaatataagctaactttcttctttctcccttagtggatggctgtattcatagagcagccggcccctgtttgctagctgaatgtcgtaacctgaatggctgtgatactggacatgcaaaaatcacatgtggctatgaccttcctgcaaaatgtgagtacaactgaatactgtttcaaaaccagatgagacatcttaacttgttttactccagtgtataactggaaaaggaaatggcagtggtggtatttaattaaatgtgcttgagttcagattttgtacatggtaataaaaacgtgctttccaagtatgtctccaaatatatacatatatataaaatatacatatactgtgtatattatatatatatatgtatatacacacatatgatgtttaactattcaggtctttgacagagtgtctctgaaagggaaataaaaacatgagcaaaatatacattatagcatttaagtgccacagagtgacagctcctggaaatgatgccaatttcttattccttgttcaggtttcttgattgtggatgtgtttagagcaaaggagatcaaagtgatgtattgtttttccagctgccatgtaaaggctgattggcaattacagccaaggcatctgtcacactttgctttcaggaaaagccaacgaaatctggttgtcagtgtgagaatgtgtttgctctttgaatgcggaatggtcaaaatttccgttatattttaatagagagaagtattgcatttgattgaccttattgcttagtgattcaaccaactgggtggcatggtatgggataaaatacttagagagaagctggtcagtgtcatagcttttttatcctgtaatcttcagggcctgaggttggaggtagagggtttcattgcatcattaaggtgtgtattgacctggaaattgagacaccaatttgttgattatcacattcgtccacttcttatgatactgctgagatctgtggaatacattttatgtaaaagtgaagctggttttgatttttgttttagcagtggagaaaatatgaatgaaaatttataatacaacctataggatactatgggttatatatagacaggttgtcataacagtgaatttcttgtggatgtgtgtgaatggagaatagcgtgttatattttaaagattactgtaaaggtatgtttaaatttgaggacttgtagcaaatagtaatatattaaaacagtatttttctttatcaatataatattgcatcctatattgttcataatggtttcagtgaaagtactttcatgtactgcatagcgatgctttggtcaatgatggaacacatatatggcggtggtcctataagattataatacagattgagtattccttacccaaaatgcttgagaccagacatgatttggatttcagatctttttttcagattttgaaatatttgcatatacaaaatgaagtaatttggagatggggcccaagtctaagcacaaaattcatttatgttttatatgcaccttatacacataacatgagtgtgatattatacaatattttaaataattttgtgcatgaaacaaagttttgattgtgttttgactggcctgtcacatgagataaagtgtggaattttccacttgtggcatcatgttggcacacaaagttttagattttggagcattttgaatttcaaaacttggattagggattcaacctgtactatatttttactgtacgttttctatgtttagctatgtttacatacttaccattgtgttacaattatttgcagtattcagtacagtaacatgctgtacaggtttgtagcctgggagcaataggctatagcctatagtctaggtgtgtagtaggctataccatctcggtttgtgtaagtataccctatgattacataacgatgaaatcacctaaggagtcacttctcagaccatattcctgatggtaagtgaagcatgattgtatatcaactatatatgctgtttaatttttcctttaatgatttttcatttatttttctttgttagtatctttacctagtgtgaaatagtcaaatcatgtgccaaatggctcttcactactacttggaatatgtacttgtgtcaaacaaaccctttgtgtagaatggtgtttagagcagttctctttgtaactcagaggtcatgatctgggtattaacggtgatttctctctccagaatcatatagtgctatttttacaaatattggttcttttgctttctaataccattctaccttcataatttacctaacttacactgccctgagaacaagcaaggttgttgactgctacaataatagcaagattattgactgttttcagacttgtatctgtccttaaaccaagtaatattcccagtcccctattgattcactgttttcttttttatgtattaaaatacaaatcaaatttctccaaatctgaactttctaaagaacagtatactcagaatcattaaatacgcccaaataaaatggtggctgtagtgtatgggttcacactgtgataattttttaaatgtgcttgtatctgtttgacatccctttgaataagttattcagtttcctttgaatacaattcatcttattttagggttattgaagacttgcacaataccaggcactgaggaacaaagatcagtgagtcaataccagtgcttgaagaattccaatgcttgagtcataacttcgaactgaagtgtggctttcatgggcatcctggggcaaatggatcttttgggacaatgaagctagaaatgaccagtcaatcaatgggactagctacagaatccatgagagctgagatcctgagagccgacagatactcaagtcactgcatgcagcccacagggcatgtttagtaaaaactcatccaatagaatagaaattaccagacaggcattgcagtgccacctcataaaagtcataaacatggaatatttgtgactaggtcttgcttcttcctatatatttaaaaggttaatgatttatattaaaagcataaaggaaagcaaggaaagcaatatgaaaatggtaataatagcttacatttttatgccactttataatatttcacagtactttcacaagcccttatatttaaaattatgtttgataaacattgtgtgtgttcattttccctttccctatccctgagagatgtttttctttctcatcaatttggttcatccatttcagagtcattaacaatccacagatgtgcttttgtagtgagaatgaaaagggagctcgttacatactgtttgggtcatttttcctctccatatttaataattccatgacagtttgacagcagagactagttgctatctgtcctctgagacagcgggtttatcattataggggtactaaagccagtcatccagccacaagtgataatatcttcatgcatcagcaatttgtttggaaaatgctattgtctgggttacagacaaacttcatagttttgaactggtttttgcctcttttatgcttgctaaattaatctattcataaatggttgtatttgaattaattatacttgtattctgtgttctgtgactcatcataattagtagaatgataagccccagatatttagtttacttttcactgcttggatgttttgaatgatttctttttgacattaagaatatccaatcattcttttcaaaagaaatcttaagggtagaaagaatattggtcaatatttcattgaaggctattgctaaggaaatgacttagaaagtagatggaggattgtttatgtaattggatcttttgggaatcttctctacaatattagatatttttgaattcataatgcaatttaaatttttatagatttttagaagcttgttgacatatgggacatttctattcatgctatcatcattccgccaagtagtcagcttcacataggcaagatttgtctatctcagtcagttccaatgtcagtatcaatcatagtgtctcctaaatatgtgctgaattaatgtgaataaatgaaggatcagacgagtgaattatttcaagacttcttcacctgaaaaatagtttttaaaaacacttttgcctctacttctaatacttttccttccgcaattattctgcacatttctagtaaattaacattcttaaatccagagtccttaaaattgtctacaatgctctacatgatgtgacctttacttctctacatcatctccttctgtgcttcccccactcacacaggctgctttgtgtgaacctggtcctcaaagcctttgcactggcattccttctgctggatttctattcttctagatacctacatggcttgttccttacctacctcaaactcttgttcaaatgtaacatcaggtgtcaccctaaccaacctatttataattgcttcagtttttaaatttgtaattgcttacttgtaaagttaatcttcaaatagcattatatcatttacttatttcttttgtttcttatctgtttctatctaccagaatatgggcacagattcttctttcttcatttttctaatgtattgctatattcatatagcttaaaaaatgtgtgatatataataggggttcaaaagatatttgatgaatgaatgaataaaacgtaactctaatcctctcaaaatccgatagtggatttttccttaaacacagactcattagcctgattacctttggccttccactgaactacttacaaccttttgtatgatatgaattgctcacaatggtgtgtctatgcatggggtctgtatctgagctatctagaaagctctttctttgctcctttcacttgtcttccagactcagttcaaatatcacttctgccatgaaacaagtcttctcgcctcacctcagctaaaaatgccttcttttttcttcacactccagaatacttcatgttaacatactgagggcacttgtcacgtgctaccttttattgttggatatgcaaacttcccacttttataacagagtaccttgtatatcacaggtactagagaaatatctaacaaatgaattagttattgaaagtgtcaaacctggttgataattggtagtaggtggaatataaaggaaaaattatgctaatattcataagaaattatgaaatcagtgtcaattatccattgtgtttttaaaaaacatattttaacatatatatactacaaagtctcctgtctccaaaatttactcttaatggagtttctcctaaggagaaaaaaaaataaaaataaagaaaccatatcacccttatttgatggttttcagcatagctcacatgtctattttatttctttagaatgcttctctcttaggcttcagggctgaatagtcatcaaggataaatggaaaaatattaaacttgtgtaaatgaaatggtggaatctgtttcttttatttcttctatttaatctttggaaggcatcaaggggtaatattgactaactcaaggttttcattaatcatttgaagggaaactctaaggtgagagaccatagcataatatgtttgaatgagtggtatgaatcagaatacacattctattcccaggtgcaataataatcagatgatagtagcttaaaatgtactgttgataataattagtacttcttttctgccctttatcaagaaatcatagtactttgaaacagtagctcatcagtccttttgaaattcctatgaggaggtgacgtgacaagtaaagttttcttacaacacaaagagaaatacaggtacagggaaaataaatctgttgctcccattaacaaactaaatccatattagaggcatcgtggtggccaaggatccctgagctgggaaaggagtctctgttaggtgttagccaggcctgctgcctgtttttatagataaagctttattagaacacagttgtggccatttgtttacatattgtctatggctgctttcatgtggcagagttgagttgtagctacagggattttacggccacagaacctgaagtgttcactatccagcctctgtggaaaaagtttgccagcccctggtctgtggcaatctgcacttttatttttatttttttctccctgagtcagacggattccagctctgtcgcccaggctggagtgcaatggcgcgatcttggctcactgcaacctccgcctcctgggctcaagcgattctcctgcctcatcctcccgagtagctgggattacaggcatgcgccacaacacccagctaatttttgtatgtttactagagctggggtttcgccatgttggccaggctggtctcaaactcctgacctcaggtgatccactggcctcagcctcccaaagtgtgggattacaggtgtgaaccacagcacctggccaatcttccctttttataaagtaagaaaggtgagattcagagagactaaatattgaattttattaaatgaattactacttattcagatcaaagttgataaagttgagactaaaatacctaccctctattccttgggacatccttgcttctgttgcctcaagagaacattaccttgggaagatgatctgaaacctttcaaatctttcaaataataaggccaccttgaaaagaatgcctagaaaaatatggtgatttttcccaatagggccagatctgggaagtgagtaagtcgagtctctcaagggagagtcagtttaaaccaccagagtattaggaagcaaatctttgttccttgtttcctccagtggtgttagctgcaaaggagcctgcagtccacaggaaatgcagtttctagagcaggtaattcataagatggttctgagttagtcctttgcaaagggtgacctgatttcagccatcgtggactctcccagcaggtgtctgattgtgaaagcagtggagtggacatgctgctaggagtatgactctgccagcctttgatgaagacctgagggccctcatgagccccttccataatcaaatgacttatattacacaaagagaaaagccgcttttgaagatcataaaatcatcttcctttctgaagaggaagatgggattgttcctcctaaaatcaactcggattggctcattttctttaagtgcttaaggaattcaggttttatttgaatctatttctccataattgtcacccttttcatttacattaagcagtttcatacatttaatctccttagtgatcctcatgatgaatgtggaaataagaagggcagaaatattctaaaaaccagagcagtggttctcaaaacgtggttcctggagcagcagcatcacctgggaatttgtttgatacaaattctcaggccccaccccacacctactgattcagaaaccctgtggtttaacaagttctccaagtaactctattgcgtgctcaagtgtgagggccattgccctagagagtggtggaatccagtagcacccttgccttgagatttcttttggctttacaacacaggtatccatttgggtcacagattagggctttttttgaagagaactctgacacgttcttcttttcctttatagcattttccactagtgatgacatctgtgtttgtttatttgtttattacctgtctttttagacaaaataacattttaagaagggaaggtgtcctatgggtctcatttacccctgatatccttagcatctgacatagtacccagaacagagttggctcttgatacatatttactggaggacttaatgaaagcattgtttttatctcctcttgtctttgtcataatcatagctgccctgcaggaaaccgagcaagaagacactcaagagagaacaacatgattccaggaatctgcagagctagtactcctgctgcttttagcatctctgttatcccatcaccaaacatactgcctgctcaaaggctagcagtataagaaagcacaggggccaaactttgcttaatgtatccacatgccacatgtctgttctatgcttagcttctttcattttctcttattttgacccattgtgataacatagagtccacccccaaatggctttgtgatgaaataacttaatgattctaatactaaatgttgtcttttaaaaaatatctaccttttggaagcaactggtgtttacactgttgtattactggctgagtgtagaattaaacagctgtgttttgcattatttgccatcatagcaagcctttagaggacgctgtctatacctcctatttcctatgtgatcaataggaaataacagtgtaaatcaattctaggtaataatgtaaatgggctcttgaaggcaattcctgctgtgaaataagtagttagcagtgacactggcattaaccacagtgggggtaatcagcctttggatgtgtttaatcagagttatcagctaagattaaaaagagagccactgttgtacagggataatcattttcaggatttaaaagatgaatatttggaggtgttctcataaattaaagccatcagaatggctttgagtaatttaggatgccctgaggtcaggcacaagcaaacaggaaaggttaatctcagagctacggtagctgatgtgcagagatggcagaatacatttattgaaataagtagcaaatgctgagtaaaagtgtagattttttttctccctgtgttaagatgttccttgagctattacttacatatatgatttgattaaaaagtagtccacagtgaacacttcgtgaatgtattaactctccctgtaattaatcactaatcccaaagattaaatattaggccatgttatgacttgattagaggtgtttctacttgaaaatattgatgtaaccaagctctgtattatagaatgtaagattgattctgtgtcaagaacactaaatgtcatggtagaagatctgagatgcataaatgcagagtgttgtaattggtaaagtccttaacttctgagcctgaggttccttatacgtgattgtctaggagtgtgaagatctcactctggagagtctgttaagccatatacgcagaaccgcttcttaatactgtcagataagagagataaatggctctattattatttgtaaaatacatggcacacttgatttgcttgttcagcccatgttttattgagtacttactcacagctagagtgctcttctagagtgtagacgactatagtgaggaagacagcaggccccttgtcctctaagagcttaggtcctagcagagagaggatgctaatgaacaagtcacataaaagcaaagaacctcagataatggtaagggctatgagagaaaaaagatccccttaccagatgtatacagtaaggatagttcatacatttttgaaatgttctcccttgctacaaatattctatttcagttcttacatatttgtaactttagtctaatttttggagataacaaagggaatgctgcttctgatagagctgacaggaattttaattattacctatttgatctcagaattttacagataaagtaaccgaggcctaggaaaattacttaatttttcccaggtcatgtggtaagagacagtgctaagactatagcctgacttttagtatagtgatctttctgctgaaggtactgcctctcttagtctctttgatcataccaaccctcttatagaagtatggtgagaatttaataactgttaagtgagatgatgaacatgaatgtatttttaaaataaaagtttcttatctcatatggtaccttattatttagtagtaatttgtagtaatattgcaagtaattttagatgagttacatataaattaattatggtcccatgagctttgccaataaactttatgacaataatccatcagtatatgtgcaacagtgactggtgtttgagaaaatatggaagtcccagatagggattaataaatattcaatactagcctcaagactcagacatttgctcatgtctctttccagtatcttgacctcagagaaaaggggtactttaaaagttattttgagaaacttcagatgacagctttattggttttaaagatatgtccacagattctttgatatttctcttctggagagctagagcttaattcccctctacttaaacatggcctggacctaatgactcccttctagcaaacggagtatgtcagaataatgggaacatctgaaactagtttaaagaaaagactgtggtttccctctctctctctctctctttcaattcactctgtattagcttcctagggctgctgtaacaaattaccacaacttgatggccaaaaaaagcagaaatttattctctctcagttctggaggccagagagccaaaatcaaggtgtcagcaggaccatgccccattctgaaggttccaggagcagatccatccttgcctcttccagcttccattggcctcaggtgtttcttggcttgtggcaacataactgcaatctctgcttctgtttatacctgacatcctccctgtttctctctgtctttaccccttctcttctcttataaggacacttgtcactggatttagcactcactcgaatccgggatcatctcaaggtctcaagatccttaacttaattgcatttacgtagatccttttccaaacaagttcacattcataagttccaggtatcaggacacaggcataactatctggagtcaccatttaattcactacatactctctctgagcatggccagtttctatgtcatgaggcagtctagaggaggggaaaaccagctaccatgttgtgagggaactcagacaccttctggagaggcttgtatgctgaagaactaaggcctgcctgcagcaatgtgagtgcgcttgcaagcagatcttctgaagccagcccacagccacatcagtgagcttgggagcacattctcctgcccaatcaagctttccgatgtctgcagccctggctgacagcttgactccaacatcatgaaagaccctgagccagaggcatccagccaagccactccaaaattcctggcctgcagaaactgtgagataatacatatatgtttttttaagtgcagggtaatttgttacgtagcaataggtagctaatgcagcaactatgatcctgaagtttataaagcaggggaaagggctcactatcagagtgggggatatcaatcacattttctcagtgcagaacctgcctgtgtcagagacaggcctaaattggaaaatgaaagccaaatcacatggtgggtaatgttacattatacaaccaaagccctttgccataccattatcataggcagcatattacattggaaaaactattatgaacgaaaacttcttagatagatagatagatcgatagatagatagatagtcaaagagaacccaaagtccagcttagtaaagaagcattgagagaaaaacaacacaaaccaaaacacacaactggatattaatatctacctactcctgttactccttgaccatgctctagtctttacctttgccactcacatgcttttttttactgataagaattactgtttctattttggggggaaaattaattcagtttctgtcctctgttaatgctgtgagctaagtgaagcagaggtaacttctcatccgcatatgttgtgatgcccttctaaatgtgtttgctgtataagctggtgtgtttcccattagctgttttatttttcagaactaccgagagtttgcttcatttttaatcacgtgctatttgtgaaatccctgtaatttcctaaggccttctggagcttgcctcttcctacctgtgacattttcaggaaagatttattctctctgtgtgtttattctgcttagtgaagatcatgagacacagccttaactggagttttgcaagttctttttaaaattgtgtctgtattgtgtttggagtctagttacccatttggaggtctgtggagggcaaagggctctcttgggaatccctttcttttactgatgctcagtgtctgctttctgatattatggcatgtgatgacaaactattgtccttccgtactgggctggttgagtttgttcttgcttttatgttactcctatacttagtacagtatattaaatacatatacatgtcatctctcatgaccttcattctcatgtagaacatatatttccttctgagttataatatgttttgtgaatatggaattcagggattgtgttcagtttgtggagctgtttgggaaagcagtctgagagagtgggtttgggagtggcttgacggaactgggatgaagggcactggggattccccaggaaatccgttggctggcagagaagagctaactgctgtgctggctaagctcatggaactgggctttcctccatatgtccgggatatgtcctacctattgttttaaaattaacaaaagttattttgattttcttcctcctaataatacctattgcctgagaagaacgatgccagattgagaaaccccacatcaaaatatatccaacaaaatggtcagagctttgtacatagaatattccatagttagaatgatccatacagctatgcacaaagagggagccgaaacagggaactgcacatcaagagttaatacagtacttttagcctttccttaaattctctgtgttgtgcaatggcaggatttctccatataccaaattaactgattgccgtgggcactaaacctgttaccttaaacacattcatatcacactacaagtaatatcttatcctttatacttattttgagattaactgtctatcacacagccctctttcctcccatattctcattttttttcttatcactccattcagaaataagggatcgatattttaaaggctgaatgtgagatgtttctatttattgttcatcatggtaattagcaactttttaattatcactgttcttgaggatgtatgtttgggaacagtggagctttcggtagagtcacaatgacagcagtttaaagctggaaagaaatctggaaattgcttttctggcaactgacaccagtttctaggcagtgcctaagaactaggcaaggatttttaccctgttgtttaagactgtacactttgcatctcacaatctatctgctacatagtaagcaaatggttcattcaggcagcaatcactgatttgctccctaatatgtgccaggtgctttgcttatttttttggaaaataatactgtgcaaaaacagacagggacctcaccctcatggaactgtgctgtgctgagctgaaatgaatcaagtgacctgcccaaggtcttcttgcacagatacttaagtgatggaatggggattttacttgggggcccttccttacaatgaaaagacctgatggttttggtcttcccgtctgggatgttctttccattaatagccacactgtctaaatggttaataacatggactttgaagcccaacattctaggctcaaactcaggctctggacgtgggcaagttgtttaacctctttgtgcctccgttttgctatcgggaaataggtatgacaatcaccctaccctcacagggaggctctcatgagttaatgtctgtgtggcactcagagcactgcttaactccaagtgaacactgaacatggttagctgtttttcagtaagatcaccccaactattttatctaaaatgtcacctcttcactctctatcttcttgccctgctttggttgacatcacagcccttataatcatctgaggttatttaatgtctttatttttttttttgctgaatgtttttcttttccactagaatataatcttatgaaagtgaggactgcattcactgttacatctccatattctaggaacatattcaaaaccacctgtgaatgagcaaatatgtgcacatagaaaactttattaatttaattaaataattaaatgtaattatttaattaaataattacatttaattattttaataaatttagtataatttaattatttataattattaacaaagttatcagaagaactagcctaagagtactttcagtttcatgctctgttcatttgattcctctagtaacttggctaatagatacaaataagccaggaaaatagcatcaacatatggtaaggtcaagctcatatttcatatttaatatacctaccaagcaagttttaggtgtgctgcacatctttttcatatttttaaaagtctataatttaagtaatagtgtccggatgaaataaagcaagaaggaagaggtttaaagaacttcagggacctgagagccatgttctgacctgcctaatgaaaagctcatgaattgatagtgaggtcctttcccccgatacagagtcagcgttcaaagtctatttctaagctcaatttattgttaaatctcattaaaataaagtgataattttatgggtttgaaatgtgttataactgacttttctgattgagactgctagcccaagtgcttacaacttgcttaaatgttgtaaatgtgttaaaagggggaatgttgatgtgtatttcctctgtgttcaaactgttcagattttatgggaaataataaagctttacaacttgttctttacaaatagaatgctagggactttgcagcaacatgagaaatctatttattattttgtgtcagagcaagctgggcatcttcctctttgtagactgccagagttcattgttatttgggacagagaaggaaatagcatgatagtcagggagataatattaattttacagaaatagaatcttattttattacaaggaaggccgtcagtctcacaacttgcactctatttgtgaagaaatattcttaagcatatattccagtaatatgtagtttaatacctatgtgaaaactaatttcttttcctcaagcatcaacttttatcacagaactttaaatctagaagtttaaagtttaaactttttaaatctagaagtttaaagtttaaactttttaaatctagaagtttaaagtttaaactttttaaatctagaagtttaaagtttaaactttttaaatccagaagtttaaagtttaaactttttaaatctagaagtttaaagtttaaactttttaaatctagaagtttaaagtttaaactttttaaatctagaagtttaaagtttaaagtttaaatctagaagtttaaagtttaaatctagaagtttaaagtttaaagtttaaatctagaagtttaaagtttaaatctagaaatttaaagtttaaatctagaagtttaaagtttaaattttaaatctagaagtttaaagtttaacttctccttatattaaaggagcagtatgaatattctttgagagatgaactttaaccatattttgtgtgtgtgtctctgtgtgtaatatatacctatagaccatagtctggggaaaactcatttttcacttcttcttttcatgcaagatcttaggtgctgtattttgcaacgtgccgtgtagcattacatttcatgatattataagctgagttttatagaactgtttcaaaaattttcattatggaccttttatatcataattgagtatctagcaaaaggtaaaaaaaagttccacttatgaagctgaatatcaatcactcaactattcagttatgcttaggcatagatgagtaagcttgttctttgacagttaagacatatggtggtgtgtgtgtgtgtgtgtgtgtgtgtgtgtgtgtgtaatagatgtgccagataactaaaatctttgcttagtactttgagggaaaaagagattcgtgatgagtgcatttattttattccattctatccacattttgtataaaatccatttaaacaggggaactaaattgcttacagtagtaaaatgcatttccctctgtgaatgttggtgcctttatgatgcatgctgatttggactctgacacagtcataatctacataccaaacataggcattttgctttcaaaacagaaactggcactgctagagctgtaggagtgagctggctcaccagagtaatctctccttcttggagagatttggcttattgttgatggcctgaagtccactgtcttggacctcagagtgggctttccagtttgtagtaatgggttctgtagcatgccaagactatagagacccccgaattcatctcttttatttcccttctatgagggaattcctgtggtcataaggcctgcagcttaacagatgagcagaaaatgtgctgaaacattggtgcttaaaaatatacaaaatataagtgggaatcagtgtctttagctttatctttgcaatgggcaaaacagaaatgactcaaaagtgatttctttagttatggagcactcaggtttctcttctgccttttgtatttccatatgtcactgctatctatattctgtagatactctacctgtgacattctgggattataaatatgtgagttgcatgcttattcactttctcccaccttttcattctatcctgagtagtctaaactgaaagcttttgaaagccttgcatgttttccacatcaacccttgaacatttatacttctaaaaaaggatgctggactctcttgataactctgtccttcaagtttgcctcatcggtgatgccacttgactgaaagtcctcttggtaatccagtaattaaatccttctagctgaggcccaagagagatccctctgctgaattgcactgcacagtaaatgacattataatgaggttttaacttattagttaaatgaatgaatggaaactttgctgctgcaattcattagatttttacgttataaaccaggacttgctgctgcagatgagagtccgtgcaattttcccttcgtataattaattatcatatcagtgtattaaagatagtttcactaaaaggagaaatacccttgtatagaaagtctaagacagtctaacaaaacatggtgatcacttctgtatgtccctgagcttggtgtgataggcactgttcagatacttctgcaatattatcaaattttaatcctcaaaacaaccctctgtgatagttactgttattattcctattatatatgaggaaaatcaggcacagagaggttaaacaactttcctaagatctcatagctagtaagggtagagcaaggattcaaactcaggcagtctctctctatagctctgcacttataaataagatttcctctcatccctagacatgaacatgaagatttgcttatatataaattcatcttattgatatgtttcttttgaatttcttcccctttttctaatgaaaactgatgatgctatttagaaagctttatttttttttacctaaaatgtttaatctcagaaaagtactgagaaaaataacagtactcatgcattacccaccaagaattttaaacatattaacattttgcctctttatttctactttttgtttttaaaataaaataaccagttatttctgacaaattcttcttttcagtctcattctttccttcccctctttccattccttgtccagagcaacccactcttaagagcagaatgtaaatccttccagactgtgttcttatatttctaccagaagcacggaaatagccataatccatatacatggtattgtgtttttaactgtacacaaatggcctcatggtgtatgggctgtactgtttcttggctttttcactaaacattacatatgtgtgtgtgtgtatatatatatacacatatatgtgtatatatatgtatatatatgtgtgtatatatatgtgtatatatatatacatatatatatgtatatatatatacacatatatatgtgtatatatatatacacatatatgtgtatatatatgtatatatatgtgtgtatatatatgtgtatatatatatatttttttttgagacggagtttttctcttgtcattcagggtggagtgcaatgtcatcatctcggctcactgcaacctctgcctcctgggttcaagcaattctcctgcctcagcctccctagtagctaggattataggtgcctgccaccacaccctgctaatttttgtatttttagtagagacgggatttcaccatgttggccaagctggtcttgagctcctgaccttacgtgatctgcccgccttggtctcccaaagtgctgagattacaggtgtgagccaccacagccaacctaaacattatatttttaaaacctctccatagtgatctatctagctataattcattctcagctgctatatttctttcttgcagatacaccatattttatttgtttattttcctctaaatgggtgattagttgtttccaatattttcctgttataaacaatactgagatgaacattttttgggtacataatgtctcacatactttgcctcctggatcgggattgctggttgggagggactgtgtggtaaaatctagcaatgaacatagaagagcaacagctgggaaggaggggtatgtcaggattacatttgagaattagagaacaaagtcacgcaggaatatttactataattatgagataataataaattacactgctaacagatagcccaagtccatacttcatgaagtctctataaacaaatgttaggtatatgtgaggtttaataaagagaactctaggctgagagccaagagacttggattttctctccagctgtgctctaacctagctttgtgccatagcataatacattaatagagttgggcacagaggctcacacctgtaatcctagcgactagggaggcttgaggccaggagttcaagaccagcctgggcaacaaagtgagatcatgccactgctctccagccttgattacagagcgagaccctgacttattttatttattttgttttaatttaattacttttttttttcagacgaagtctggctctgtcgcccaggctggagtgcaatggcatgatctcggctcactgcaacctctgcttcccaggttcaagagattctcctgcctcagcctcccaagtagctgggactactggcgcacactaccacacctggctaattttttgtatttttagtagagacggggttttaccatattccccaaactggtctcggactcctgacctcaagtgatctgcccgcctcagcctcccaaagtgctgagattacaggtgtgagccaccgcatctggcctgagaccctgacttcttttaaaaaagcaaaacaatacattaatggtctctgaatctcttttctcttatctgaaaatgaagaatttttggtagtattttcttatgatttcttccagcattaatctacccaagttaaggctggaataagtttcctttatgatattaatacctctcctcagcattgaactaaatgatccacaggcccaaatcttcatcgtcccccaaactgctgccctgttgtccctgaatatagcgtccatttgtaattccaggcagtgggctgtaatgggcccttgatttattgcgcccttttcctaccgtgtaaatagcccagctcactgcttcttgggtgggataattatgaaccttgtggccctcagatttctcagtgggatcgggctccagttacccacagtggtaactggcttgataacagcattgtttattgtttctttcctactcctgtctcacttctctacttctggccattgtattctgaggtcacctgagattcttgtctcaagatcttcttgctggggaaactcaaaggaagatatccacctattcaaatcctgcctgttttcctccctctagcttcattctatagccttggaaggttcgtcctggcctgttcaagcctgttttcctctctctagcttgattccacagccttcgaagtttcttcctggcctgttcaaacacaagctcatggagctgcaccagactcttaccacatttgtcattggaaccaagtaatgcaacatcacatatgattatatgcgtgttctttttttaaattttatttctcacagccttggaagctgggaaatgcaaaatcaaggcctggcaggggctggcttttgagacagctaggtgttagctgttacttcctatggaggaaggggcaaggaacctctcttgtgtctctcttttttttttcaatacatttaatagtatatatagttaaggcctataatatgagacacattcagatagtaaaatgattactatagtgaagcaaattaacagattcatcatcttacagtttcccattttgtgtatgtgtgacaagagcaattatatctacttacatagcaaaaaaaaatcccacatgccacaccactttcttaactatcctcctcatgttgtacattagatctctaggcgtgtttattctacccgtctgttactttgtatcctttgagctacatctctccgttcgtctcacctacattcatgttcgtactttttatgtcccttcccctcccaagcataatataaaccgccaagagccaggaactctttttttaatttcatttttattaaaaaaaaataatgcccctctatgcctagcatggaactaatgcagaatgtacccatgtagtgtattgtcactgaatgaataatttagtctgagtaagtctatatccccaggactgattttgtggatgccagccatctcttcttggatttctttgccttttaattaacttcccattagacttgtggttcttagtgacctcctgagggcctgaaaatcagaaggttgcagactgggccatctattttatgggagtaatataaagacatactctctttggtcacgttttcagaaccttttgactaaatgggcagaagtaattgggaataaaaatgtgttgggaagtagaagttataatttcttatttttttctaataaggactttaattctaaattcattcatagctttgttttaaagttattgtcagtattttatgaagttaaagacaaattcaaacattaatgattctagatgttttgcttcaagtatctttgccactgtttcctcctgtgagatggagtctagattttctttccttctcttcctctctctctttttcttctcttcctctctctctttttcttctcttgtacagaataagcctgattttttttaattttgtgatattttaaaaattctcttttattttgattgatattgcatatgcttaaaaattggtagaagaggctgggtgcagtagcacatgcctgtaatcccagcgctttgagaggccaaggcgggtggatcatgaggtcaagagatcgataccatcctggccaacatgatgaaaccccgtctctactaaaaatacaaaaattagctgggtgtggtggcacacacctgtagtcccagctactgtggaggctgaggcaggagaatcacctgaacgcaggaggtggaggttgcagtgagcagagatgatgccactgcactccagcctggtgacagagcaagattctatattaaaaaaaaaaaaaaaattggtagaagaattcaagtgagtgaaactgagagtttatggttttctccagcaaatcagtgagtgttttccctgaacatggatgctttggctctggtcttcacactctgtgagatgaggaccagcccttgtggcctctgacttccaagacttcagtacctgagggtattattacatattttatgagtttaaaaattgaggaaacttttttcccctccaacagtgaaacattctatttatcatttgttgaacctgtctagtgagtactgattttgtagaatacttccccaaaagctgattttccagattcagttcttttcaaactgcaaccagcccggctgggcagacagccctctccttttgctccgctttattcttcctgaattgactttatcactgtccctccagccatttccaggattcatcacagattatctctgcttgttggcagaaagcaagcaccgccgagactgaagggcacaattgccgaaaggttcttctttcagttcagtcctcattctaatttttaacttatttggtgctgctgtggaaaagctgtttgcctgaaatatggtaaataaataaataatatcctacatatggagtccataaaataggatgcagaaagctaggagctcaaatttagatccaaggcagtaattctccttgcttctttttccgcttcccttcttagcctcccttttctccttaaatgatcaggctgaatggggttgtcaggattgaaagaacaggatcccagattttataaaattgtttactcctctctgtttgaaatgtgtaactttgcagaattgagtgtaattccagtcatctcctaaaaggctgggatgatggccagggcgaatgggcttcctgaccttttctgtgtggagaggcttcacggaggagcactgagggcagaagacacagagccagtcttccatggaggcgacccatagcagcgggatccagcaatgtgtgaagtcatgctggttttacatatgaaccaatttgaatagaatccttcattttttttacataaatattacatcttaaccttttcatagaagagcctcggttttctttccaaaggtataaaggcgaggtctgtgtttccataagcagagaacatttatcctctgtcctgcctccctctagaacaaaatccattgctgtcttaatttccagttttgattgtagctctcagtgtgagacctcccagtgctgtagagtgtgtttcctctatgaggctcactcaccacaggcataaagatcggggtgaatttcccagccgcctacatccgggaatctctcattcggactcagcaagatcatttttatttttgaccagaaccttataaataaatcacaaatatataaatgtgatagggaaggcgcccatcacaactatttgttcaaacaaatcctgggcccaaagaaggagtgaaaaattaacttcctatcactttattttagtagttcatactgacagcaaatatttaattatccattattttgaattccacattaaaataatactcataaggtttggattaatagaaaatactcatatttataatagttagagctttccagatacatagaggcaatatagtctagtgcttggtaattccctagagttggaaaccttggtttaaacctggcctttacatcaaacaagctatgtgtgcataggaaactctgagctctttgtttcagttctctcatctgtaaaagagacacaacaatagtgactaactcacaggattgttctaaggataatatgagatgatgtgtaacacatacaatacctaaaacttggtaagcactgttaacattaactagtaatagcatttcagtctcttttctgttcattacgacatttaatcttcctgataacctcttattataatatacactgtggtagactaactttgctttaaagggccagatagtaaatatgttcagctttgccagctgtatggtttcacttataaacactcaactctgccagtatagttcgaaagaagccaaaggcaatgtaaatgtaagggtgtgtctgtgttccaataaaactttgtttacaaaactaggtgtcaaatgagatttgacctggggactgtagtttgctgattcttgacaactctctacttgctgttacaaataagaacatgaaagcagcttggttaggagattgactgtgagaacattgctacttagtggtatatttcaaagtaatatccatttttttaaaacttatttcagggcttttctgcacaactttttgtttgtttgttgcttttattttgagactgagtctagctctgtcacccaggctggagtgcagtggcacgatctctgctcaatgcaacctccccctcccacgttcaagcgattctcctgcctcagcctcccgagtagctgggattacaggtgcccgccaccatgcccagctaatttttttgtatttttagtagagacggtgtttcactttgttggccaggctggtctcgaactcctgacctcgtgatccacccacctcggcctcccaaagtgctggaattacaggtgtgagccaccgtgcctgacctgaacacctgtttttgatggcaatttcttatctagtgatcatctgcaatgtctgagatatagacttatgtacatcattggttagagtgtgggttgatgtgagcagtcttctttgactttgttttatagccaagagttcagctttaaatactgagcaaacttcctgccagcatggattttggttagaaaaagaaatgggcaaaagtagatgcctgtttcaatcctgactgaggaacaaatgtagcacctcaaagcatttctttatacttatacatttctttaggttttttatataacactaaaatacttacttttttttttcagtcaaaaatatattcctgagttctaaatctttaatttgggggacatggatcaaaattttgaaattttggttgtaaaagacacctagaggggcacgaagtctgtggcttgtgcaaaatcttttacacatgcttcaaggatgcacacacatatacaaacacacactctcacacactcacataaggtaaggagggtgtttgggtgtataaaagcaaacagtagaagctgcctcaaaccactgtatccagtatatatcctgatccaacatatatgtatttagattcaaatttaataggtctggcgtcaaatttctgaacccatcacaaagtagaagcaataaatacaaaaaaggcatattgttcataaagcgtgactggctgtagcaagagatgacagctgacctttggatactaaactagccataaaactgaaaaatcatgccatgataccttgttgaatcacttcttaagtaaaggttaacttacatacattacattctgattgtttaaacagaaacaagtgtagtatcttttaggattaggtcattttaaatttattctgacaattagaagttttgattcttcaatttgttaaattgagttttctggaaaatgtacctctttctgaagttgaagttggataaatgtagcaattccacatgttcatcaatgtgttacagcctaaaattcatcttttaaatgagaatattaatttcatgtttataaacatattttctaattgatcaactgtatttatttttatttatatatttctccatgcaaaatagaaatagctctttactcagatgagtgatactgaatctaatataaaagcaaatttgtatagaagaaatccagggacagcagcggtcagaagataattcacaacttgatgaggtaaactaccttgaatacccctgagaatgagagagtaagcaaggagacctcgagtggccaaagcagagatttcagttatatttactggacaaaatggacaccataatcaacagggaaacacaggatgtactttgggtgagtggtaaagttctgcccatatgaaggcatactcccatttatttgctcagtcttggcctggtgacaggcaacaaatattgaataagaccctttaaatgaattttcaaaaaatgaagtttagtgatttaaatagcatttaaaaaaatcaaattcatagtaagggtgcagtaaatatttggtttacagtttcatcttgcatactgtggaaagacgatgagcatggaacttgttatcaccacgtagaattcctaaaataattgtttcaataaatacggaatagtagctcaggtttcagatttttacatgttattgactgagcctccctttggggaaaatttaaaagttaaaagatctcttttaagatgattcagaaatgcaaggtttatttaacatcttcctcattgccatattgtgttctgttgttttcctcatatcatgtaacttattatcattttttattacttagtttcatttttacttcctttacctactcactcattaattcttactgccagtattttaaaacctttctgcaaaaaaacacatgcaactgcactgggtcagtgtttctcctgattgataatccactttccacctccacatctaagtatacaatcattgataaaaatgaagcccccatggactcttctcctgagagatctcattcttcctgcttatcagcttctgccctctgtctgagggattccatattggcatctccgaaatggagatattttcctatcaggtgtattggagttaaaattgagagagaacatgcaatcatttttatcttttcctgaatcatatgcaagtttagcaccaggtcgaaaattcaagcttagacttgtttgtgctctaaagattgagaaagttgctcagattgctctggagtgggtcatgagttttcttcctggatttttgttcaacacagatagccatctttgatttattggaacctcttgctagagcatagttataactcccagagaatccttttgaagtcaatttcagctttttcatattcaaggaaaagaggaataaatcatgtatccatttttgatctgtagtttttcaggaatcattctcaatgttgttgaagaagttagaaaagcccaagctaatcactgtatcatataggttttccgaaggcaaggtgtagaaatttttagtgttgtttaagcaacccatttattttgaagtattgaaatgttattaatcctaaagaccaggtgatagtttatatattcttgaaggctttaaaaatataattagcctctctgttacaaattgagtccacattcatcttggggctaatttatttcctttacaaaactaacgagtgtttgtctacaggatcagtgaactaaatctaaatgggggccaaaccttcaacttcaccctctggcaactctttttcccattttcagaactcttccaaatcccccgccccagccccagtatttccaattgacttatagaaacagttgcattgttcttttgcccaaatcccaagcattccccagagagctgttttcactttctttagagcacttacagtttatctctgtaagagaatagttttgagtttggcacttagtctgtttctttttcattctaataggaatcgccttagagctagctaagtccctgttagtcagcttcttaagtgctgaccagacttcttccatctgtatagaacactcactttttcacatcagaggtttaatgaaactagaaaagaaaactctttaaaataacaataataatgaaaatctctaatagattcaggcaactttacatatatcttttcaagattgggtcaattttgcaaaaattttgagggttttattttttaatatggcctcaggttagagtcacacaaatcagttaaaaaatatatttctttgagttggaaatacacacttatttcatccctgtacttctatataggggagttatttttaatgagaaaaatttatagctgactgccaatgacacataaaaattagtatgcattattaaaaataaattaaggcagaaagcagccaaagtggactttgttctagagtcttggtaaacagccaacagcagtgctcacttgtcttcatgtgacattaaatagtgcccgtctaaaaagtgattaatagataccgcgggttggaacaggctggcattcgtctgtttcttacagctcctgatacacgttgaatgccctgcatacctatagttcttaagggaatagtcactgttgagacatttagagaagctgatatcagatgagggcaatcttgttttggctattttaccacatctcaagtatacaaagtctacatataaacattacgtaatgccttcagacattgcactgattcaaatagattttaatgagaaaggccaacttttcctgtttcttggtcattcagagacttttagggagcttgaattgtcagtatctcctaatctctcaactatttttttcttttgatttttaatctcactcagttagactgttgggaagagaatacaataggaggattaatggctcagagcagaaatgtttgcttgttggacaataggaagggaatttggtagaagttcttacccttcctgtttacattcagtaatgttgctggtatattgaaaagactgtcaatagtgggtatatatttttttcaacagtaatttccaacatcttgttgttaggtgttcatcaaaataagaaagacggagaaagaagaaaacagagacaaaaagaaaaaagataatggatttgagaagtcaagtcaattcagtcacaatatgggagtaaaggacagattaaaagaagtttcttgtgtgagtgtgtgtgtgtgaatgagtgtgaaaatgcgtgcatgggtacatgtgccttagagtagaggtaattggaagacttgaggagaaattactcacttttcttttaataccaatgaccagacagcttgccaggtgctcactcagatttgtatcatatctttacatactgtcttctggataggtacaactatccccatttttcagatgaggacacagaatcttagagaaatgaagaactagatcaagatctgtttgaacgtaagtggttgagtcaggatttgaatacaggctttttgtttttatcactccagagtctcttttttcttccttggtaaatccagacttatcactggagattctggttcaaaattactctggcagttttaccacctaatatatgttactccaagaattttccaagtctgattaaatagattaggtggagtcctccgaaaccctttcctgatttcctgggccaaggtaaagcatatctcagagcaaattttaaacagtactttgtcattgaagacctaactatatatgaagcattgtgtaggtgctgagaaaggcacagaaaaatatacaatagggcacttgccaccagtgccttattaattagataaagagataaaacatacacctgtgaaaagctaaaaaaattactattatcaattgacaatttggcatagcaaaacaaggcatgattaattgccagataacacaaaatgcatgtggtagaatttgagagatctgtaattggacttcagtggcctgataattcttaatggaagcggtttaagctggagggaaaggatgggcaggatttagacagggagaacagaggtgggagatgaattcaggccttaacaaaagtgtaaagaagagcaggacagcaggaggctgggttgaaggacataaacaacaggaaggtaagtaaactactttggacaaagtggggctctgcatagataggaagtggaaaagcaacctcaaaaataggttgggctcaggttttcaatcctgagtgccagcatagactgagcctgttgccatgggtacgtggaaaatgacagagtcagtattgcactttgagaagattattcaggaggcagggtgcaggatagaggacgagtgtctacaaataaagagtgaggcaacacatatgtccatcctgcattgggccacaccaagaacctaccatgtgcacctctcaccacccactggcgctcagactgctgcacacagtagcccccaactcatctacccagatccacttttgtccccatccactctgttctccacagtttcagccagagtgatctttacaaaacataaattattgtcacctcctgcaaaagatttcaacgtgacccataaatatattcttattttttcctccatgtcctatccctcaacatgacctacaagacctggcctctgccttctcttcggtctcatccttcaccctgctcactcttgttttctaggcatggtggtctttttaaaaactgtgtctcattctttgtgttcaacatgccccctctcatgatagggactttgctgtttcctcttcctggcattctcttctttcccctcattgtcttgtcaactcctacttatccttcacatcaacacactctaatttcaagacctccttgactaggtcagatccccttatagaagggtctcacagctccaagtaactatctctcctttgcagcttttattacatgtgcggtttcaccacttatctaatagttaattcatgtttcttttccgcagtgtccacagtgtttttgttctttatttaattcaagaatctagctcttagtggactctcaataaatataatatagtggaaacaaaataatatgtggttaaaatgtaaggtgttgtattagtccattctcatgctgctaataaagacatacctgagactgggtaatttataaaggaaagaggtttcattgtctcacagttcagcatggctggggaggcctcaggaaacttacaatcatggcagaagggaaagcaaacacattatgcttctcatggtggcggcaagaagaatgagagctgagcgaagggggaagcctcttataaaaccatcagatctcatgaggacttactatcacaataatagcatgcagaaaactgtctccatgattcaattacctcccactgggtccctctcaccataggtggggattatgggaactacagttcaagatgagatttgggtggggacacagccaaaccatatcagatgttataaaaatttctatatttgaaggcctcagctattggcaacattacttaattttaaatacatttggcactgattttaaaaaagtgttacatagtattggaattattttcagagggctgaagaatccttcataccttggagagtgagtgagcactctttagcaggcctcttgtgcttccaacctaaatgcaggcaaacgtcctgttggtatgtaaagctgccacccaaatgcagagaacctctagagtgcatgctgttctcattcaaactgtcccatctgttcagacatggtcaagctctctgagccctgggagaacgaaaacaggccaggattaccagtttttacagattttaacgtgaggcttagggtctgtgggctaaaaggttgattgtagtttttaagttaaacatcaacaggggctgaaaagaccctaaaattacatttgggagtcatacaaagacaatacagctccaactgcattactcgggacctttttgctgctgaaacagaaaaaatgataattaaccaatcaggatgaaatgtcaatttgagaggaaggtaatgtgaaattttcctaaatcatctaaacaccaaaaaatctgttacatctgatttccaacctgctctgttgctatgaaaacttactctccactcagctctctgaacgctacatattcatgcaattataattctttctgaaagatggactctgtaatgatatgaaggcgttttccttcagtctgcctagagtttttccagagccacttaataagagccatgctcttttggaattattttgctttatccacatttttcttcatgatccaaataaaagatagttttttaaatgtgaggtggcagttgtcttgggatatatctctatggcatttgctaaattaaagctcatcttttcaagcccagtctttattttgttttcctatagtttgctggcaaaatcaaagcccttgcttccttactcttgcactgtggagcagactggtaggatgatcacaggggagtgagcaggcttcagtggttcttaaaaagacaatttccatttccttggcagagggaccccatactgcgctccagccaattcttaattctttctgccattggttccgaggggcaggcttttgtggggagggattatttgtttctttaaaatccaccgtggttcttttccctcccaccttttcccctttcttttgtggcctggaacaatacaatgttagcgattcagtttctgacttgcagagaatccatctatgcttggaaaaatgcagttcaattatatactgcagcttgaggtgagatagaagtgaagatggcttaacacgtgaagtgggtaaaaaaaatgtgtaattgaaacagtatgatgttgatgaggcagtgtgtgaggctgtcaggaggcattataataagctgatgaacgagactagcttcctagttctgctgtatgcaaatgttccattatttttggtggaggaaaggaacctggcatattaattggctttgtttttagagatgcaggtgaagccttttcattttgctttctgaaaagaaacttgcaatatgtccttaaattatgtttaattttgagtgtcgacttacaaagaaataaaaactcttcatttttaaaaaatttaaaacaaaaaaaaatttgggggtattgaaccttagaaccaatcactaaaaattctgattttgtgtcgactaaaaattctgattttgtgtcaactaaactgcatatgagatcttcgagtttttaacactgaaacataatagttaattttttaaagtactataaaacagaatatagaaaataaattacactatactatattttctatatttggaagtttacagttgtttgcataattgacaagttcgtttcctggtgcagtcatcagcaggttatacaggatgtatctatctgtctctttcttcagaggacactgtgtgtgtgttgagaatgaaaccgaatgtgggtggtaagaggaaatattaatgaacttttaaatatctctttccttgaaaagactgaaatatgaggtcttaagtaaaataaatcatttaaagtataaaatgcttaaagatccttactttttattaccaagttattagcagactgccatactgaataccttttatgtagttttttttttttttggctaacatttccaaacaactttaaaatatagttattcattaaccgacttgtgactaatctttttcagagagagaggattaactttattcctctccagttttaacgtgaccaataaggtgatatgcaagtgaggatttggggaggtggggaagaattggagagaggtaatagaactgatccttgagtcagtgggatgttggaagtggttttccattactttccttggttctcagaaaaccagggagatagggaggatgttatcaggccctttgaccttctggaagtgactgtggacttagcaaaagctagttggagctaggggaggaaggaggcagatagataaagtaggaagaaataattgttctccctaagcacagaatccaaggtggtgctattaaaacaaacaaaccaaaaatacacacacacacacaaatgcacacacacacgtctgtgaatgtatacagagatggtgcggtggctcgcgcctgtaatcccagcactttgtgagcccaaggtgggcagatcatgaggtcaggagttcgagatcagcctgaccaacatggtgaaaccccgtctctacaaaaaatacaaaaatttgccaggcgtggtggcacgtgcctgtaatcccagctactcaggaggctgaggcaggagaattgcttgaatccaggaggcggaggttgtggtgagctgagatcacaccactgcactccagcctgggcgacagagagagactctgtctcaaaaaaaaaaaaaaaaaaaaaaaaaagaagagatatatatgtgtatatatattaatatgttgacaccacagagtacagtattagaggaaacagtgtgggtgcatgtgattcaaacatcagttgtgaggccgaaagagaagctagtcaacaggtgggggtcttttaactccttctctccctccactgatacagaacccccaacactcatatacagtgtgtttccagaaatccaacctggctatccctttgaggctgataaaggagccaagtatccaacctgagatcctgtggttcatggagtctgagttcctattgaacacagatcatggttgcctggatgggaaacctggtttaaacatttaaatgatcagaatcagagcagcctgaaacagtcatccttgatgctcaagttcctgagaaataattactagaaacaaaatttcattgtttggaaacttttccagaaaatgataaaataatactcgtgagaacatagatcacagaaaaagaaagttcagttctaatgtagtatgtttcttttacctagatttattcattgttcctgtgtttattttctttaacaaatataaacaaagaagaaaaggcagcctcctgtatagaatgcttacacattttataagttaaaaatacatatagtcagccgggtgtggtggctcacgtctgtaatcctaacactttgggaggctgaggcgggcagatcacgagatcaagagatcaagaccatcctggccaacatggtgaaaccccatctctactaaaaatacaaagattagatgggcatggtggtgtgcacctgtagtcccagctacttgggagtctgaggcaggagaatcacttgaactcgggaggcagaggttgcagtgagcgagatcgcgccactgcactccagcctggcgacagagtgagactccatcttaaaaaaaaaaaaatacaaatagtcattttatagtttagtctaagcatttattacacatttcaaaagacaaataaactctctcctacttttgtccacctgtaagactcatttcagtacctattttattttctcctagtttttcccatggtcttagtttaagaattcccaaattctcacttattgaattcactcacagaattctacttcccactacagttctatcaggaataggcaagatagaaagaaaaaaaaaaaaaagaaagaaagaaagaaaaagaaaataaagaaagaaaaagggatgggaattttgcaaacatgggggcctgattactaaaagccttatgagatgctcatactcattctttaaagaatattggaaataaatcagtcatgcatttaattaaaccatcctaaaatgtgcccctcttaaaaaaaaatgagtgccataatacttcccaaattcccggaaatgttgtatgtctaagaaagcaagatctgaactgtaggtgtatttcagttggaaattgtagtttacattacttctaattcgaggcctatgtttggtcattaaaagctcccagctaaaaacagtgaccctgctctccatgtgtgcgcaatcttcagccaagtcccaccagagcattggcccttcagtggagggagaaaggatgatagaaaaagaaattctgtggatgtgagaggttagggatagaagggtatttgggcagctctggctatctcatatctggaatttcaccttttatcttcctggaggatgactccttatatggtctgctttgtagaccactttcttgaaaagcaattgcatataatataaaacagaggatgctgtgctaaaaagaaaaacaaccctccttttattgatacttttttctcaaatatagtgatcactacacgatagtaataatggtttgatatttgtaaatcttaggtcttaggaaaaaccacatatggtctgttaacctaaatgatctttagaataaagtacagcgttctaatcaattcaattcatatttcacatgtagttattctttgactaaacaagtactttttgttaaaggaagcaggtaaactaaaatttatgtatttcctcttctgaagtccctgacgtagttggtttggaaaaggtctccaaccaaccagggtgctgaacattcatcctgagtaatgtgctgttttggttgataacagttgtcatagtcatttcctcctttagttagcattttggcctaaaggtagtagatttatggtttttagcctgtttcatttcccagctgccccacaacttttttttttttttttttttttttttttttttttgtgaggcagagtctcgctctgttgccaggttggtgtgctgtggcgccatctcggctcactgcaacctctgactccctggttcaagtgattctcctgcctcagcttcctctgtagctaagattacaggcttgcgccaccacctccagctaatttttgtatttttagtagagacggggtttcaccatgttggccaggatggtctcaatctcatgacctcgtgatctgccctcctcagccccgcaatgtgctgggattacaggcagaagccactgctcccgcccacaaaacttcttttaaccacatttacaaattgctgggtgcttctgcatacacacataatgaattataaatattagataaaaagtatgttgaagtaaattgaacattaaaactcaaggagttggccgggcatggtggctcaagcctgtaatcccagcacttagggaggccgaggcgggtgggttgcttgagctcgggagttagcgaccagcctgggcaacacgatgaaaccccgtctctactaaaatacaaaaagttagctaggcatggcgttgggcgcctgtagtcccagctactcgggaggctgaggcaggagaattgcttgaacccaggaggtggaggttgcagtgagccgagatcgtgccacttcactccagcctgggcaacaaagcaagaccccatctcaaaaaaaaaaaaaaaagaaaagaaaaagaaaagaatctctcaaatgtgaaagtctggatacacaactatgtttgcacaacgctcaatttggcataattataaattgcactccagcctgggtgacagagcgagatactgtctcaaaaacaaatgaaccagaaaacccccacaaaactcaaggagttaatttacatttagaccaatctagatgtgtttaaaataaaagtaaaaatttcagttctgtaagaagtgtctactggggcaagtacaattagtcctggcttacacatgagaaataattgcctattgtctattattttattgcctaggttactgccaaagcttgtgggtgattcctctgaccctttgtactaaaggggctttctgaattgcctttcttcataggtttcttctgtattgaaaaggctttcatggcttttcatgtccttagaatgaagttgaatttcctaagcctgacattcaagactctcctaaatttagatgaaagttaccttcccaacctcatgaatcattatgctaccttaagacaatttcaaccaagataggcttttccttgttacctccatgacttccttcattcagctgctctaaccatgcagtgacctctctaatcctccccttctcttaaggaaccgtgtggtagaaattatatagacttaggcccatgacagactagaattctatgttggaaaagccactgcttccctctggggctcagttcctgactcagtaaagaggtatcagttactggcacagtaatgccccataacaaacaaccacaaaatttcagtggcatagacacttatttatccttcatttgtgggtggctgggctcagttcaagacttcttcataagactctcattttttgatgatcagtgagagataaggattgtttttctcatgggcttggcagaaaatctgaatgtacatgtgcaattcaaggctttgctggcgcagtgtccactttggcctcagaaagtcacatcatcagagtggggaaatatagtccactcctagtgggaggaactacaatgtcattgggaaaaaaggcatagatatggggatgaggtaaagaattgagaacaatgatggagcctccagtagtattattaagaggttaactcagataatctaggttaggtttctgacagggcatgtggcacaaagaccctgaacacgtttttctttccccctgtactttcctcacacccacttgttcaaactctccttcttcctttagtcttgcagctgttattctatcactggcacttcctgtgcttttcacatagtaagcagtaagtaaatggtttttaaacataattctataatcattatttgcttttttattgaaatacatatggaacagcctatatgtagcccttgtatcttctcatcaatcctaagttttaagttcaagtagaatttagttgccaatttagacacctatattggttcccaaatgtaatgaaacaaagctaataaaattctttaaacaaaaaacaaaaacaaaaaggtattgtctctgcttcttagtagcactttctctatagccatctctttgagtgatgtctgactttatcttctgccaaagatagataatgtttatatcagacaaaaaaataattataataacataagatcgtaagaaatgacttgtcagcttatattaatctgactttggtctctgatcatggccaccagatatatttggtggaaccactcccttgtcagaccaccttgcaggttaaatctgtaacccaaacacctccccacttctcttttaattctcagctttttaaactttaagtggcttaaatttgatctttacattccactgtcattccagcacatacacaaaaatatgtattttgtgctatctccttggtgtagtgactgtgtggtaagatggaaagactattattgagcttggaatcaagtccctgctttggcacgcgttagctgggctgcagttttctcatcaggagcatgattcagattgtttattcttatatatcctttttgattattaccttttgcagctctattcactggaaatgaggggactagaaaagagaaaaaagagataaaacattgactaacgtgtctttgtgccattttcagtcactgctttggaatctggcaggagagctaatattcctgtttcatttttattgggcttaaaatatatgtttatcttctcttgatgaagatttggtattttttttatccctcggatttcttctttgaggtgactaaatgtgctgtttcttagaaagcttggctggaacttttcatctagtgtgctagagtctctataaaacatatctaaataattttcaaagactttgctttaaatgcctgttgaattctcctgggtaatattagctgagtttcctcatgtacatttggtggtacatttttataattatttctatttggtgctattcggcttttcacaaaaattatgtatctggtcatatcccttggtctgtgggccattgtgactcagatttcagattgcatacgtatgtgttaaatggagtttcattctcgtaaaagaaaccttactgaacatgaccactcttctagtggtttccatgtgaaatgaattatgttctattgtaatctggagtcttttcattttcctgtgagaaatggtttgaaaattgtattctgttgtttacactgttgggtatctcttaggaggcttatacagaggataagaactaagatagctttgctctccttacttcttggtgtatctacatagcataaaaattaagatttatttcttaaggactatgaatgttttgtaacattcaattttgagacattcaaatatgctgagtgttttttaaacagatactctgtaaaaatgaatgtactaagttctcagactaaggtgtttttttttcccactcatatgtagaggaagtttggtgttgtggttaaaattatgaactctggggtaagactgatttgatttgggtatcaatctctgcctctatttgactgagtaaatttcataactaccttaaagctccgtttcatcacctttaaaatggggataataatagttcccatcacccattttactcaacaagatttatcaaaggcccaatatgtgtgagtttatgttgtaaatggtagggatgccccataagagaaaattcctatttttgacttctactgaaaggaaataagcaacatgagtaaatgtgcatgaaaaagcagtagaaacaactctgataaaataggattgggcactatattaggttcaatagtttatgaaatcctttctgcagaggatatttttaagctggggctttaagaaggaaatgagagaagagcattcaagcaaaggaaacacatatggtaacaattctgtgctaagaatgagtttgctatattcgagtaaaaggcaaaaaggccagtgagacttgagcatgatcatctaaggagaaagtcattcaggtattagacaaagacaggctcaggaactgtagagtcctgtaagccaagaaaggagatggggttttatttgaagtatgttgggagccactggaaggttgtgaggaggaagcaccatggcttgcttagtatttttttacatattacttgggatattgtgtggagaatggaatgtacaaagaaggcatgttatgaggctactgcaatagcccagatgagaaatagtagtggattagatgagggtggtacttctggagatggagacaaatgggtagtttcagagtatgttttgggggtgaagtcaacaggcttgctcatggattggatatggggagtgaaaggatgggaagaatcaagaacaaatcctaggtttttggcttgagcaactgatggatgacaacaccatttcctgagatacgagagggaggagaagcaggttttggaagtgataacaagagttgtttcttggccttgttaacagctacttcagggtattaagtagcacttgaaaatgtgaatctggagttagggggccagtcagggataaaaatataaattttggagtcattggtttataagtattgagaatggatgagatcacctaagcagagaatggagatggaaaaaagaagcttccccagaatgaatagtgtagtgcaccagtgtttagacatcagggagaagagaaatcagcaaaggagacagagaaggcatgcaaactgagctagaaagaaaaatagaatatgaagcccttagcatgctcatatatagtagcttctctataaatgttgatatattatgtgtgtttccccagaacactgagataaggagactgagagatggtccctggaagtgctggtacggaagtagaaagtgaggcaatggaaggagaggaagccagcaaagcttgtgttttcaagcaggttaccagcaaaaaactgaagctccattctgctggtgaccgctgggaaacaatatagaatatgcctcagagtagccgccccagagggtgaggacatagatgtattcatcctccaacccccatttgtcattaactgagggctgctctctggtgagtgaactcctcagcactttggggctgctctatatgggccaagaaaaagcccttaggggttgcagatgctgtttgcacaggaaacagtgtgtgcacccacagtgtgtgctagaacaggtgctgagcagatctgacagtggttcctgttatcatgtcccttacgtgactggctctcatcattatacctttcttcattgaaatattataggaacaaaggaaattccaattgataaaaatgaattattaaaacaagagagaattcaaaattcttcataatggtcataccaaaagatgtgatgaactcattgaagcatattaaccaatggctcagtaattctccttatattcttgtttgaaagtagcaataaattttaaggcatattccttgagtgccaaagacatcattaaatgtgacaccatcaaatatgaagatgaacacatataaccttgatattttgaaatactagaataagaattcataccatacagtaccttgaaatccaatgcctttctcccaaagggatcaaaggttacgcttgatgcttttcagggcaccttgtacacaggagatcacttgatcctaactcctgggatcagaacgaatgaagcgattagtgtcacaggcgaaactgaattgcttttaagcttcttatctgagcaagtgtcgatactgagatcaagacttaggtttgctaaactctgatttggtttcctcatctctctgccataatggaaatagtaaaatgtttcctagtgcttataatatgccagacactgccctaatcactttacaaaattagctaattttatcgtcaaaacaacactatggcttaagtagcattattgtcttgcttttaactactcgggcatcaagttaggaaactggttcagttcacatctcataagtacgaaagtagggattcaaacccaggcacctgcctccagctctgttctcctcagatgactcttacacagctgttacacagcttatgtggcagtaataggctgtgatcttatccctgactatatgaattacttggaaaaaatcacacacatgatgtgtttactactttttccataaatccactttaaaaatcattttaccagaggttaaaaaaaaccctcccatcagcagtcttatttataattgaaaaaatttaggttcctttttattaaatctctttcatatggtttaaaccatatggtgactaattttttatacagtctaaagtgtatacaatttgttcaatgtagttttgcctttttgtgaattcctatgctttatcattaggctgaaaagcatgcaggataccagaaatactcttaccagtaaacttccattgaaaatctggctatggaagaaaagtctgccagccagtactttgtactttggaaaggaagccatagatccagatattctccaagaaatacaggcagtggctcatgcctgtaaacccagcactttgggaggctgaggtggattgatcacttgagcccaggagtccaacaccagcctgggcaacatagtgagaccctgtctctacaaaaaaataatttaaaaattagcctggcatggtggcatgcacctgtggtcacagctacttgggaggctgaggtaggaggatcatttgagcctgggaggttgaagctgcagtgagccatgattactccatgacattccagcctgggcaatggagtgagaccctgtctcaaaacagaaagagagagagagagagagaagaaacaaagtagttactttatcactccccaaatgtaatttatcaactgtctcttcagtctcatttgctgttacctgcctgctataccaagtaactaatcataattttcaaaggaatttcaaatatgttacgtcatttgatctcagtaagatttttgatgccaggtagatctgcaagattactttcataacacaggagaatctgatattccacctttagggaaagggattgctcctggaagctctttccaactcttttcccatatggaagaattttccagtcccatttcactctgagatattattattacttttcctggctactttatattagtgactattttaaatcctactggaggggatttaaaggctcttgtgcaatcctttcatagcccatgaatttcaagaataagagttgcttaacttactggccccagaattctgtttccacttatctctatgttaaactagagccacagagaaaaattatgacccagtaatttcttctcttatttaaaatgtcaagctcctatgtcctgaaagttagtactagattttatatgtctgcattttagttttagttttgttttttatttcagatcggaagaaaatgaagtattctgttaatttaaagttacttatggcacatccctgtaatactaatcacttaaagatgtagcaatttatattttttacagtgttaattcataagtggataggactgtgaacaaatgaattaaaccgaagtccttataatttaaacattcctttttggaaagtactttaaaaataaactgacttaaatacttcctatttgaattattattttctttattcttctcatattggttctaagatatgcaattttatatagcatacgtaatagctaaatgttaaagactgaatacctgtgcttctctttaaagtctgttttgtcttctggctaaagccagattccatttaaaaaccttacagaatatgagacactattttaccattattgtttgtgtcaactgcagccagagatgagctcccgatatctctggaataatttagaagttgatgccaagtcatgattctggtcaatacagtaatttcagttttgtaaagtttatttatttaaaaaaattagttcagtgtttcattcatgatttttgtaataccacaaggaagaatagaaaaatgtaaggataagcatgagaaacaaattagttgataaattattataagcttcttataataatgtcaactcagataactctccatgtaagctgcatatgagcataaataaagttaactgtatgattaatctctactattgtgtttgcatccaagagatattaaaataaacattatggttagatagagtaaattctaaaaagctgcaaaaacatttaggttatatatttaacacatagtaatatgcctgtgtttacatcttccaattagataaatttctgataatttttgtctccttaggattttctaatgaaaatagagagcagtattttaattgtttagtatcacataattgttctagccttcatatacaatttaaaataaatggcacaaaagtgcttggtaaagcactttataaaactatatgaatttcatctgttattctgactttaacaaattatacaaatatcatagatgattataagttaaaatacagatatgctctagtagcagaatttccacataagcatgctaccgtacatactttaaaccaagaacttccatttctaatgataagattgactagactagatatgttgacaatccttttatcacgcatgaaaaacacttaatatattttatgtagtatcctcaataactgtttaagatatatgattagctggcttgaaaataaagaaattgtctaaggtcaaaggactaagtgagagctggaatctgaatacacaagggaacattgatctcctttgacctgggcaattcttaacgtctctgtgggggtaagaaccaaagcccagggcccatgcaaggtgaggagtgtttgcaactacaagctcaccatctaatggattggcggcacacattcatgcgacttatttgctcaaaaactcccaagctaaatatttactttaaggttctcttgggtgatttatagcagaaaatgagagtccttgttaaaggtacacactctcaatacaaatcacaaaataattttatgaataaagttaaaatggtcacaaactcagtatgaaaaaaagcactaaatgtacgaagaagtcaccatgatctaggatccacaaaagcagcaaaggtaggattatagtattagaatcattaggtaagaatgtaactaagtatttgcattacatttattaaaataaaagggaactaaatgttcttaagaggtgagagactataaaaaattattaaaccatttttttaggagaatcaaatagaaaattagcaaataaaataataaattttgaagagcacaacgtggatgaacaattaagacctggcaaactagaagatctaaacaattgcagcctgaagagtcaaagaggtagaaaatatgggagccagatgaagagatgtggagggtgtggtgagcagacctagcacacattcaaatgaaattccagaggaaagcatagagaaagcggaggacactggtttttgacaataaaatgggtaagaattttccagaattaatgaaagacataaatctttagtttcaggaacaccaacaaatcccaagcaggaaaaagaaaaataaatctacatctaaacacattgaggcccaatcatgctactccagagacaagactaaaattgtaaaagcagccactgagaaaggacgactcacccacatgaccaacaaccgttattagactggcaggtctctctcatggcgttagcgaaagatggaaaacattagaataaaagcttcagagtgctgggaaccacagctgtcaaaatagacttataaacccagtgaaactgtctttaaagaaggagagatacctttcaagaaattaagaacaaagaatttgctagcaacagacccttccagaaggaatttctacgttatgcacttcaagaagagaatcctaaaaggatggcacaaatatgaaaataaatagcgagaaaagaaattcatacatatatagtatatagataaatctaatataatattgactgtataaaccaataatagcatccgttcataagattcaaaaacagataaaaaaaatactggacaaaagttacatgtaagctgagaaaagggagatcaggtttaaagtgtttttttaaagatctttctattattccagaggtgaattcagattacatttaaacattgttaaattaggtatgcatgttttacataataaactctaaaataatagaaattagctgtgtattgcccaaacaggtttagcacacacacacacacacacacacacacacatgcacacacacactcacaaacacatacattaattttgcatcaaaaatattgtcttctgtaatttcaggaactattttctgctcataaccttgtaggccctacctgaatccaacaagaaaaatgtaaaaataatgctcaatcctggtaataaaagaaatcatatgtttaacaatataaagatccatcaaaaacaacactttaaagagatgaatgagactgagacctttgctggcctacctgggaggaaacgtgcctgtcctgagttcatgctgcccctataatgcaggattagagaacacatcatatttgtcctcattatagagatcgttctaatgaggaaaaaacttatgtcaccgaatctacttttctaaacagaatccacgatctcttagaagaccaggaagcccttccaacgtaccacatggtgctgacactcaatctctgcctaaatgaactcagagaactataactggtgggacatatatttagaagaaatagttatgaaaaccatagcatggtgctgccattgttatttgctaggtaggagtctgctaatagttatctccttcatgtggcttcaatttctatatgatttggggatattctaaagcactagtatttaaagtgtggtgtggggacctctggaggtcccccgggccctttcgtccaggttcatgaggtcaactctattttcatttaaatactaatgagtgatatgtgccttttttcactctctttctctcttaaatgcatggtgttttccagagggctacataacaggtgataccttaacatattgaatgcagaagcagatacgagaatccagtcgtctttttttaaaaccagacattaaagatatttgcaaagatttaaacaatgccattcttctcactaaattttttggttttgaaaacatggttatttttatatgttaatttatattcatctgtattgttaatctttacatgaattaaatattttttaaattctcgcttaatttctaatatggtaaatatctatagatataacacatagaaacacaactgtaaggtcttaatttttaagaatgtaaaggggcttctgcaaacaaaaagtttgaaaatgacttctctaatacaacagaaagggaatatttatagtccagtaagactttgaaaaggtatagagttcttaggtattttggaggagactgtggctggcgtcattttgtaatgttcctatgtagcaacatctattgggaaaaataaagcatgtgtgtatttgggggcaggtgtttctagtatttcttgggcaaactttgagtgctatgtattatctgtaatctttgtttggactttctttgtggtaaattagaaccccaaatgttttcataacttcaaccttgaactgttgttttaggatagacaccaataaatataaggggtccactgggaaggcagagagcatttttagatttatgaagggggaaaaaaatcaatagtgtccctaaggccgtgtaagtcatgagtaacacaagtattcttatgcaaagttgacaatatcatgaaacataaacctttgctttggaattttaccagaaattaaagtggcattataaaggaaagtcgatgttttagcccgtatctcaggaggaatttgtccttctgattgctttgctctgttacctcactttggctgagctctgtgaagaatttttttttcttttcccctgaaaagttaggtgacctcctcacattcttctgccttctggctcattcactttttctcccccttcaatctttgattaaagcttctaggcccctaggagttcttatttcttatacagcaagccatgcactttgtcctcttgttaaggaatgaattaataagcttaactccctctttgaagaagagtttggaatgctttcttggagaaaattaatattcaattaccaaggttgtcatctcaccaaatagaagaataaaagacatagcatagccacacttgaagataattgaaatcgaatttcagtttgtattataccttaattacccaagctttcaggggaaattcttaattcttatgtctactttcttatgaaagtgagtacatttttcctgatgcatatttataacaagactgtttaacacactgctttaaaagaacttggattgagtggttcttcttgcaatggactttggagttttagacacatcctagttacctatgaaattcatagtgtttatcttttttgacattgcataagtcctccaaaggacaataaaaataatacttctcctaattgcatcctttatattttataatattcctgtgatactttgattggtgatagtgaacaggtacataagaggcagctcagggtacttccttataggtaacccttttcctgcataggtttttaaatcacagaatatacataaacatttatgttggttaattgtatgataaaaatattttatagttaataataatttaaagatcaaacaaaaactttgtgagggcaaggagagtaagaaattgataatgtatcagtacatggagaagaattacagcatagcatagagtgtagaaaaatgaattcatagatggtaaatctacacacagataactctgggaagaattaaaatctgtgcttggcatctgcattttacatttgtttctctgggaacttggaataaacaatgaacctgcagaagcaattataaaagctttgatgcattataaaataggcaggggttttttttccccaaactggggtaaaattataaatgaagccaagtttatccaaggctgatgttgacctgtcaagctaaaatagaaccgacttgagaatccaaggacatagcattttgttggggctctagtacttatttgctgtgcaacattgagctaattgcttaacctcttaatgccttagtttccccatttgtatattgaggataatcgtgtgttctctgactacttcacaggacttttgttagaaaatatcagatactgtatgtaggcactttcaaaaatgatcttatattactgatttcaaagagttattattaagctcccttaccctctgatttctcccattctgacacatcttcttaaaaaccgtcaaagagtctgaaaacatatccctccccaccctttttttcagccaagacctcactcttacaatgtccaagaaatattttatattaaaattaacaataaggggccgggcgtggtggctcacacctgtaatcccagcactttgggaggccgaggcaggcggatcatgaggtcaggagatcaagaccatcctggctaacacagtgaaaccctgtctctactaaaaatacgaaaaaaaattagccacgtgtagtggcgggtgcctgtagtcccagctactcaggaggctgaggcaggaaaatggagtgaacctgggaggtggagcttgcagtgagccgagatcaaaccactgcactccagcctgggtaacagagtgaaactccatatcaaaaaaaacaaaaaaacaaaaaaaacaaaaacaaaaacaaaaaagcaaaaaaaaaaacaaccaataacaggaaggtactaacaactaccagagccttgttatgtcttcatccaaaaaacaactttttttttcttaatagtaactttattaaaactaaagtcttttgactccatagccaaaatgactttgataaagaaggagaaagttggagggttcacatttcccaatgttaaaacatattacaaaaatacagtagtcaaaacagcttggtactggcatgaatataggcatatagaccaatgaaatagaatttatcatccagaaataaatccatgcatctatgggccactgattttcaacaagactatcaagaccattgcatggacaaagaataatatcttcaacaaatagtactgggatgactgaatattcatatgcaaaaggatgacattgagcccttacctcataccatttacaaaaattaactcatgatagattaatgatataaatatgagctaaaactataaaacccttagaaaaaaaataggagtaagtcttcatgacttagagttggtgatggattcttacatatgacaccaacaagtaataaaagaaaaatattaatagataaattagacgttattaaaacaaaaaaagcccttttgtgcctcaaacgacactatgaagaaagtgaaaggacagcccactgaatgagagaaaatatttgcctgtcatatctgatgagtctatctagaatatataaaggacacttacaactaaacaactgaaagagaaacaatgtaagtaaaaattagacaatgaacttgaaaagacatttgtctaaagaaggtatacgaatggccaacaagcacatgaagcacatgaacaggcgtccacactgtcagtcattagggaagtgcaaatgaaaaccaaagtgaaatacctcttcacacccctgataatggcaaataataataaaaaacaagtaacaagtgttggtgagaatgcggagaaattgaatggaccctgcatactttgctggtggaaatataaagtggtgcaaccaggctggcatggtggctcatgtttgtaatcccagcactttaggaggctgaggtgggtggcttgcttgagcccaggagttcgtgaccagcctggacaatgtggcaaaaccgtgtctctattttaaaaatacaaaaattagctggacatgatggtgcatgcctgtagtctcagctacttgggaggctgaggtggaaggatcacctgatcccaggaggtggttttacagtgagccaagattgtgccactgcactccagcttggttgacagagccagactcggactcaaaataaataaataaataacaataaataaataaataaagtggtgtagctactgtggaaaagtttcgtgattcttcaatatgtaaaatgtagaattaccatatgatccagcaattctacgcctagatatagatgccaaagaactgaaaacaggtgttcaaacaaaaacttgtacacaaatgtttatagcagcaatattcataatagccaaaaggtagaaacaagcccatatatccatcatttgatgaatggataaaggaaatgtctcatatacatatgtataatggaatattatttagccataaggagaaatgaagcactaacacatgcaacaatggagatgaacctcagaaacattacactaagtgaaaaaagccagacacagaggccacaaattgtgttactccatttatataaaatattcagaataggaaaatccatagagacataaagcaaattagtgattgccagagggagacaggagtggggagtgattgcttaatgggtatgggatttccttttggagtgatgaaaatgttgtggaactagatagtggtgactgctgtacaacattgtgaaagtatactgaaagtcactggattgtatacttcaaaatggcaaagtttaaatattaaaaaacctaaagtaaacaaagtgtttttcaaatatatcagtcagtaaccaaaccaaacatccttcatgtatttacatgaagtatctccacaacaacagtgatatcattaatatcagtgataatcatagataatgataacgtactcattatgcacaaggtgctattctaagagttttgcatggatttgcccatttaatcatcatgacgactctctgaaataatcttcatatttttattttaatatgagaaaaccaagacacagaaagtttatgacttatataacatcacatacatggttaataagagatttgattctaattggtctgtttccgaagccaaagctcttacccagtacattgtattgtctctgcagcaaaaaatggaaacaaatagatacttcttggacctgatttttttattagaagatgttaagaaaattatacaacagaatctgtatcaccattgtctttttttttagaatttttaaaatatactttaagttctgggacacgtgtgcagaatgtgcaggtttgttacataggtatacacatgccatggtggtttgctgcacccatcaacccgtcacctacattaggtatttctcctaatgctatccttcccctagcccccaccacccaacaggccctggtgtgtgttgttcccctccctgtgtccatgtgttctcattgttcaactcctgcttatgcgtgagaacatgtggtgtttggttttctgtttctctgtttgtttgctgagaataatggtttccagcatcatccatgtccctgcaaaggacgtgaactcatccttttttgtggctgcagagtattccatggtgtatatgtgccacattttcttcatccagtctgtcattgatgggcatttgtgttggttccaagtctttgctattgtgaatagtgctgcagtaaacatacatgtgcatgtgtctttatagtagaatcatttataatcctttgggtatatacccagtaatgggattgctgggtcaaatggtatttctggttctagatccttgaggaatcgccacactgtcttccatgatggttgacgtaatttacactcccaccaacagtgtaaaagccttcctatttctccacatcctctccagcatctattgtttcctgactgtttaatgatcaccattctaactggcttgagatggtgtctcattgtggttttgatttgcatttctctaatgaccagtgatgatgagctttttttcatatgttcattggccacataaatgttttctttgagaagtgtctgttcatatccttcatccgctttttgatggggttgtttttttcttgtaaatttgttttagttccttgtagattctggatattagccctttgtcagatggatagatagttttctatagctaggaaaaaagtttctttggaagaactgaaagctggcctatgccagatgttaacaaaatagcaatacatgctaggagttagttgtttattatgtcctctacacagtcctcattggttttgtgtttacctctgataatagttgctatatacatatttcagaaatttgcaaactgttttgtttttctcaacatattctatcaagtgtttttttttttcatctcttgaactgagatagaaatttgagaatgaaaatggttggtttttggaattttaggagagtattttaaaagtcagtttcctgaaagctgtttaggcaaacatttataaaaggcaaaatataattaacaaagaataatttcaaaaaatattatgcaaggtaaaagatgtctaaagtctgaataaagagtattaaaacactctttccgatcataaagaacaactttggtgatataaaaaagctgtttctatttggtgatcgccttatacttcaagagggtctaatcagtcctttttgaaaccgacaccttcaatgtctcctaccctatctgaaaccaaaaaaggtaaaatgaaaattcatctcacccactagtctccagcctcttcccctccgttatttttcccctcattgaaatgtaagtgagggagggctggaactgattcttctctgtcagtgcttagaacagtacttagcaaacatagatatttgacacattttgaatgagcaaatgcacgcatacatgaataaatgaatttaccaatttctttgagtctgttatttctgcaaattatatatttatgtatatgtatatattaacatataatctatagattatatgttctttacataaaatatctactcaatccatttccaaataattttaaacatcacaaataaaattaaaagagaaataatgacataaaaaaattcacaagtatccttaatatagagtacgctattggaaaacagaagggaaaatactaatactttaatcaaattagaaaataatagaaatagatttctgctaagtataattaataaaaattttaaaagttccacgtcactaatttataaaaatacacaagtggaattaataggagataccattttcttacttaaaatatttgtaaaatctttaaatcataatgttcaattccatagaggaatgatgaagtaaggtatatcaagtgaaatatataccatcatatgctgatggctgttaggactttaaattggtatagcatttggaggaaataatttagcaatgtgaatcaatagtttcaaaaataatcttactcttgctctcataattttacttctagaattctagtatgagaaattatgatacaaatatgcaaccataaacaaaagaatgaaaaatctctttaagtactgatctagaaataactgtatattaagtggagaaagcaaaatatgtatgatgtatattgtatgctaccttttttggcaaaaaaggacaggataattacatatattcatcttcacctatatactgaaaggtaaaatataaaagattatatatattaataacaatgttacctgtggggtagatgaggtggaagtggataaataagaccatggacgggagcaagatttttcactgtctacactttgtttatataaaaacaacttataagacaaacaaaggtattatctactcaaaaattaaatattaaaaactattaatagaaaaaagtgggatttgtagaaatgcatgttttcaggttgaagggaggaaaaatatataaatgcttttgtttgtgggatgttgtcataattatgtttgggttaaaagaaaattagaaatgtacacaaatacttattggaagctagctatatacattacactgtttttttacattgactgaatattggaagcattccaaatactttgatatattcacataataaaagaccattgaagttaaaatgatgttgtaaaataatacataaaatggtattaaatatatggaaatgcattcatggtatgttaaggtagggcatggatagggaagcaaatgagatgatagtatgtaaagtaggaatctatatttttaaagtaaaaattttcaaagcatgcatacaagcttatatgtacatatagagaaagaactggaaggatattcacctattaatgatagtgcttttctcagggtagggggatgatgggtatgtttcctattatctttattctttaaagttcttcaaataaatactttatgaaacaaaaaccaaaattcctccgcttattaaaggcttagaatgggctatttattatattaagcattttgagcatagtctcttaaatttcttaaaatcacacaaggtaggtcttatgaaccattttacagatggaaaatctgaggctcagagagattgagtaacttactcaacactgcacaactagtgtaagatgcaaaactcaaacgctggtctgtctgtctccaatgctatttctctatcaccctactaaataattcaacaaaaaaaccctgcttgcaattggaaaacatttttcctactagttttctttttaagtggcaaatcttttccttggttatcagaacttacatttttgtgaagtgtgctaaaatgctcaagaattccctgacagtaatttaaattaaactatcttgcatatgtgaattatttcatgtttttttacagtagataaaatatgctaatttgtgtaaatggtcttctgggtacagatgcttacactgaaagcaagcttatcttaaaagctgcttatctttcatttgaggcttctttatatgcatagtttatttttctaatgctgtctcaatataggaataattttaaggaggtatttgtggctaaatgaaagattaaaaaaaaaccaggtctcttggctttggtaaatattaatgagctcatagaaaatcttgttactgaagtgggccctcttttgagagttttctgccatcttggccctttgtgggcccttctcctttgttggggattagcatactgggttgtgtgtgctgttgtgagttctgcttcagttcctttgtgtgtgctgacagaaggctcaccttggtctattaccagaatagtctaggcatcttaatattatattggatttctgtgagaaaaaagcaaatcatccagaaataattaatctgacttattcatttaaaagctttaacacaaaatggacagtgttcatttcggtcatttatatattgtcatcattaacaaagtaaagtccaatgtttattaattttcaagtgaggagaagttcagaatttgaattatttttatcgatattcacacatatattgtatgtgcaaaattattacagcacatacacaacttgatttaggcactctgttttcctttagaccaagcatcatgttcacttgcctacagatttctaaaaattatttttagtttcataagcagtaatattttttaattgtgttaagaactcagagaaggtaatgttggcgctattattaccacattggtcatcctctaaaaacagtgttgtgaggttggtgttagatataaattgtgaatgatgattaagtacatttactgatttcattctactatatgcaatcctgaaatatgagaataggtatatttaacttgttaggtaatttaatgaaatatatttgctgatatcattctactatatacaatcctgacattatgtaagaagaaaaaaggcaattccactattgacaggatataggaatgatcaaaattacttaacataaattttgaaaaattaaatttcccatgcatattttaacttctccattagtccaacaggttgtatgatgcttataagggaattatttggcaaagaaatattttctttttaagaatgcagtatatgagtatagtcacaaggggtcataaattcacacccagtttttttaaaatgagcccattggattaaaaaaaatcagaaaaactaaagcagttgtttgaaaactttttttaggcaagaaaaaaatgcattaagcactttcaagagttattactgtcatcatacacttcttcatcttctttcatagaagttcaatataccagacatttttactgtcatgaagagagaaaaatgatagttcaagaatataacaagagtatttggaaacacagatagaagtgtcattagcccactattaagtctgtactgaaaaacgttctttaaattttgtgctcaatcatttgaataaaggatttaagtccttttataaaaactgtttttggaagaaattttataagaatttttatcagagccaattttgagctgaggttgtggctggtaatattcagttgttgataaatggagtgtgaatcctgagagaaaccacttcaatagtttgagaaagaaggagacaatttctgaaaatgatttcctaatctgagaaacagagctttcttctgagaaaagttttaataattttaaaaactacagaaatatggagtcatggtcacatatagccatttttccatagttgtatttgtggtgagttagaaaatagatatataataaaggtctggaaatgcaaacagtcaaatttaggtttgattattattagttttgagagaaagacagagaatagtacttaatataaactatcattatgttacttctaagtatgttcctttcaattcagctgtactagtaaaattttactttttttttttaataagggttaaaatcatggttgaaatctgaagcatagacttgatatattgctttcctatgctaaggttcctagccctggacactaattctaggaaaaatattgaaaagaggaaaagagctctcaaatattaaaactgcaccataaagttcaaaagtaatataaactttattttattttattttatttttttttttgagatggagtctcactctgtcgcccaggctggagtgcagtgacgggatctcggctcactgcaagctccacctcccgggttcacgccattctcctgcctcagcctcccaagtagctgggtctacaggcgcccgccactatgcccggctaattttttgtatttttagtagagacggggtttcaccgttttagccgggatggtctcgatctcctgacctcgtgatccgcccgcctcggcctcccaaattgctgggattacaggtgtgagccaccgcgcccggcctataaactttattttaaaagcttgactggtattaagaaagcctataataaaactcaaatgtatttttttaaaagatagctaatttcttcaatgaaattcaatatgatctgaatttttacttagacacagctttccaataacatattgtggtagtaagaatgctggtccttccaagatgtccacaccctaatctctggaacctgtgaatattaccttacatggctagagggatgttatatagttgtgatgaaagttaaggaccttaagatgaggagattatcctagattatttgggtgcgcccagtctaatcatatgagtccttaaaagcagagaaccttgctgtgatttaatcagacagagatgtgcctgaaaaaaagacacagagatacaacagtgctggctttgaagatgaaggaagacgaccacaagtcaaggattatgggcagactctagtaactagaaaagacaagaaaatggtttcttcccaaatgtcccagttaacacttagtccagtgagacctgtgttggacttatgtcatacagaacaccaaaataataaatttgtgtagtttaagccactaaatttgtgttgatttgttacaagagcaatagaaaattaatacacgcgatagtaggttgaataatgtccttccatatatgtccatatcctaattcccagaacctgtgaatgtttccttaaatggcaaaatggactttgcagatgtgagtaaggactttcagatcgggagattatcttgaattgtctaggtagaactggatgtagtcttaacagtctttataatacagacacaggggtggtccaagtcagaggagagggtgataagctgatgggaccagagactgaactttgaagatggaagtaggggccacaagccaagaaaaataggcagacaccagaagctgaaaaagtcaaggaaatagatgctgttttcagagactccagaaaaaaaatcagcttgaccacacttcaactttagatcattcaaatagagtttggacttctgacttccagagcaataagataataaattcgtgttgttttaagtgattacacttgttgaaatttgttacagcagccagaatacactaatagagacacatttatgatataaagtgaggtatatatatgcaagaggctgcatgggcataggatggatttttgattctttgaatagaaattttgctataagatcatagaagctatgttttcaggtaaaacccagtttactttaaaaaaattttttaattgacgtataaaattgtatgtatttaccatgtacaacatattgtttggaagtatatgtaccttgtggaatgactaaatctagctaattaacatatatattatcttacataattatcatgtttgtggcaagaacactttacatacactgtcttagctttttttcaagtatttacatctatattaagtgaatttaactttaaaaacttacaatgtagtagcttgtgagaaaatggcggtcatagttcacatctgtattttcacacattgagtaggcccctcccacatcagctctgggttttaccagataacttactttggctgatagaacagtgtcaaaaatggctcaagcaaaggcttaagaagtgcttttgcattcgacttgctctttcttgtcgctgataccctttttcactgtctgaagaaacctgagttagccttttagaggatgagataccttgtagagaggtcccagctaaggcccctaacgtgagagttttgctgtcatagaccatcaaaccccagccaaactggtacagactggaagaactactcactcaacccacaaaatcagaagtaagaaacgtttgtttttttcagccactaagttttgggatgatgtgtttctcagcaatagataaccactgtagtgcatttattttctcaggctgtaaggtgcatttcagacatgactgttcctccagcaatcataaggaggtagcattagctatcctatattagatttcttctgaatcatttgttgcctttggtttttcagggaggtgggctagaaattggactagggacttcctgggcatcctgaaactactgaaattgagtaccttgacttgtacttttcagaaccaatttttaaaaatctttatcctccagaatatatccaactaaaaaaattaggttagaaatatttttgtaaagtattttaccctttgaatagattctgaatgaaaaggagaatgtacttcttgctaaatgtctatatttgtataggcctatatgagtatggtagaagagaggttgtctaagcagccacctaacatgttttaatgctgcggaatatcatggctgatgggtgtcctgcagaggcagtgttacagcactgaggacatgcctcagaacatttccctaggcattctaacatgttcagagatggatatcatagtggttaaggctatggctgtggatatagactttcagccatccaattctggttccgctttttactaggttatttacttcaccacatggggacaataattgtacttattcattgggttgttatgaggctttaataagttaatgtacaacatttgtaggagttgctggctggttgttagtgctcaataaatgcctctcattgtatgtaccaggcgattttacccccacccagagtctgccttgctgtagctgtgctactgtcctatgttggagaggaggtgttacctcattgggacccttcagtcaggtggttgaagtcagagctttgtagaaaagaaactaaagatccatttgcttctgatgaaaacttactaccagaaaatttcctgaaaaattaaagaatatggatgcagtccctcctggtctctcagagagctgtatattaatctctagggctctgaaggaacagtttgaagacaacttggccagataacctctgaagtccccacaccccgccccaatgctgctctcaaattaccacctcatggctactcctctcatattaggaaggtgatatttatttccatggaaaacaacaaagttaactgactcctttgggaatggaaagaatgacaatgtttccttcaccatgaactcaatcaactaaaataaccattcacgcctcccagctgctttcaacttttcactaccaggaatttccctttacctcttgacagaggaactcctgcagttatcttctcctgtgaccgctcatgtttgcaggcaaatatattctccttcagaggagctgacataaaagtattttaaatcaaaatgggatttaatatcacttgttattaaaatacatttctggtgcctgttttaagggtttattttcttgccaaatagtttagtgtaaaaggagagaaaataagtaaatcttatactatctaaggttaaaaaatttacgttttgtgatcatgatgtttgtattgagaaagtatgtgtgtgtgtctgtgtctgtgtgtatagcctgtaatgtgtaaggatatgatagaaactatatcacccacgcatttcattctattgccttcatgcttagttatttgataaataactgtatctcttatggcctaatgtaaaataatgaatcaaatttccccagtgctgaaactagtcgaggccttttgggaatacttttcaaaccattaacgcattaatgtgctgctacctatgtgtcctgaaagggttactgtaggtttcaaaaagggtctaatttactagctaatggtatttttttcgtaagagtcacttggctttgcggaatcgaatttcatctttctgcttttgggttaattcaattgaatttccagcaaactacattgtttcattctcattgcagtcagtccctcatcttacaaaccattgtgttccaaaaactcatttgttatttggttatttggaacttagaggtagttttcaatagaaaaattaaagctacaaatgttgggtgtgttcccagaatagcccacagaagccaacttaacccatcatatgtccagtcctcatgctgctatccaacaaaaccaacatgaatagcagtgcctataaaggtagcgtgctttgccagatccaagctgggagtcccagagctcattcttctatagcagccctgtcagtaggagtgagaactttcctgtcttcattcctccaacctcaaaagaagcaaagtgagaacacagcccagccataaaccatcaacagtgactgtgattgtttgggccaggggttgggggtagaattactcagggacaggggactatgtaatagagcttaagcatcaagatagaggcagaggagaatgaagagtcaaaattgtttataagttgtcaggatgtagtgaggtcttagaatgaggagtagaaagattgacaactaggtgactgggtgagtgaagacctgaaactagattagatttaaaggcttctgccaccctctcttcccctttacaatttcagagtcagctacagattcaagttcacctaagtaggattgcttggtaaagagcaggcatttcactcactggaaggctttataagaaatagctcattttttctgccattttttttgcccctgaggctcttgctcgggtggaaggagggaggccaagggagaatctcaggagagcatgggagcagattagagtggtatgatagaggttctcaggcagagacaaaaaagggatctcaatcttggtgtgcctctgctcctatctctgttgttataatgggaaaagtttgaacgtcaaatggaagagaaagtgaacttctagaagaagggatgtcaatagaggagcctctcctgcatgtctactaggacagtatccacgtgtaataaagtcaaaccaaggtggtctttctggatttggcttttctgacagtttcctgagaattgtctcaggaggaaaggatgcagttctcaaatgtttctttggaggaagccatatacctgtctaaggaaaccattataatcttagaaatgagcttttgtaccagatgtaccacatatacaagattctcataggaggatccttgatgagcctttccttctcctgtcttgagtgctcttctcccctcatttaacccagttagttcctacacgcctcttagcatgcccatgtcatgtgctcacgaaaacctttcctgaacatgtttcccagtcaggctaggccagaccctgagatagaagcacactcaaagcatattttgctgctgcttttcattatttttactctctgtcacaatttgaagtacataactcattggggaactcctttttaaatggttgtcttccccttcaagaaaccatctccatcaagacagagactatgaattaaccactgtatccagtgcctagttcagtgcctaacacttagtaggtctttgtaaatatttgtcacgaactatcaagaagcagaaattttgtatcttaacatgtctttgtagggaggtcacctttaatgcatacctttgactattaagaaacttaagtagtgcacagagaagatgtagagaactgttaaataaaataaattgacttaaatgtatcattgcttagtataagggtggactctagacagcctttatatctcaagaaatttgcctacttctatgtcaaaattgtattagtacctatgaactttccaaactagttaatgctgttttgagttgaattggctttagaaattctaaagtggagagctgcccttggcttgctgcattgagcagactacagttcttaggtaggaggcaggaatggtcctgaggaacagtcagcatctctgccatccatgcaccacggtagtctagagcaactgagaaaaccagatgcctccatagaacccacaggtgtagacattaacaataggacactgtggatctttgtgttgatttcagccacccacccaagtcattaatttatagtttatgcccttcacaaaggaaatgtttttgctaacaaatctcttatgatttcatctatttgtcttttcctctttgtgttttgtctcatacaaataatagttaacatagtgacacaaacaccactaaaatacttcagtatttttctcaggacttattcattttacctggaaggaaattgccgtataacccatgccattagaaaattaaaaatgcaaccatttctgcagctcgtacgtcatatgctatgtaatgaaaacgtgcctagcctcctactcccttgtatttgccaacagaacttaagcaagttctgtctgggctgcactcacactttcttagtgccagggagatgattggatataaattacatagcttatatttcctaatatactaaaaagaaagggaaaaacagaaaaggaaggaagtaaaggaaggaaaaaaagaaaaggaaggaaggaaggaaggatctctaagtgtgtatcaccagaagcttagagagatgatattttaactgtagaaaattctcgaagattaatctactatatcatgattctttgaacttcaaagtatacccccaaaatataatatgtgaacagttgagtactattgcatatttcagtcaaaactaaaaacaataatctgtaactgaatatgtaacttagaaaatatcaatataaattttaatctaaatgatctgtttattcctttctcaaataatgacttcattttagtaatagagtgttttatttactcatataggcatacataaatagattttaagcattatttgtgatgaggcataaacatgaatcttctaatagaaagtggtaccttggggtaaattttattagggaaagatttcacttatgtgagctatcaaagtgatcaaattcatggaaacagaaggtagaatggtaattaccaggggctaggaggatggagaaaagaagagttgtttaatgtgtacatagtttcagatctgtgggaggaaaatgttctggagatctgtttacaaaaatatgagtatacttaacacttctgaactatacacttccaaatgcttaagatggtaaattttatgttgtgtgttttaatcacaattttcaaaaagaaaagaaatattcataagaaacttgaatattcttctagttttgcaaattatccttattgtttagcctcttaattgtatatcttacaaaaatctagatttagaatacaaaattattatgtgtattttatcatataaactcatttgagatgttaaatgatttagaaacactataaaattatagacagtttgtattcactttttcaaagttagttaaaacagtgttgatgtttctctgaatattgtcatgtttcataaaaacgttaatcttcagtaatttacatttattagaataatagtgtaaaacatgttatttacgatcattaaaagttagagtgttctaaccaattattactatttattgttgttattattattattagtttgagacaggatctcactttgtcatcccagctcaagtgcagtggcacaatctgcttactgcaatctctgcctcctgggcgcaagtgatctgctcaccttagcctcctgagtaactgggactacaggtgcatgccaccacacccaaataatttttgtattttttgtagagatggggttttgccatgttgcccaggctggtgttgaactcctgggctcaagtgatctacccaactcagcctcccaaatgctgggattacgagtgtgagccaccatgcctggccgtaaccaattattttaattaatataaataatcagagtataacaaaatacaccaaaactggttatattatctttataaaatatgttttataaatcactaacaaataactaatctggttggtgataaatatgtctgcttttacttattcctctccattttagtattgtaattttttagcattctatactagatcccatgtacagttgaagttttcttttgtttgttttccctgtcaggcttttaattaaagaataataagatcttatattattatagatcttatatcgcttatataactaaagagtacattcaaccaaactttaactgaactttacttgtttcatactggtggaaataagcacaatgtgaataacacctgagactgtcactggtggagagcgctcatgagcccagccctccttgggcttccttactggcctcccagccccacccttggcctgtgccatccttaatgtgaaatcccattacaccttacctaatctctcaaatggcacctatcagatcttctcttttattcttgagtattcagttcctcccttttttttttgatctttctaactgacatgtttacagccatttaagacacacagcacatgtacacatgtaacttccctcaaatccatgtgcttcttccattactctgtctcttttcttctttgcatagcaaaactgatctgtaccaattagtgaccgacatccttaatctagcagacaggttttagtctagttttctattgtccagatgatgttgcataatcaacaatgtcaaacttcaggggcaaacaattctgaagttaaataaagcactgcctagttcttgtacctgtgagttcgctccacccttgggctctgccctgctgtctctatttcttctggaactcaatggctagacaggcgtgtccttctcatgggaagagcagaagcacaagagggcaagtggaaatgctcagatcctacatgccatcaatttttcctttttcttttggctaaaacaagtcacttgaacaaaagaaactatactccactgatttttgtgggtgaaactgcaaagtcacacagtaaagaatgtggatatatgaagaggggaagaactggggccaagaacatcatctaccataataatcttacctacctttggagtagcaatgagtactataggcttttgccttctttaggaaataccctcttcctgtggcttccataatgaaacattgtcttgatttcctcccatccctctggctgcctttgtttagtttcctttgctggtccagctttctcaagacctggtaccaccatctcctcatctttttttttttttttttttaatatggcctctctacttagtgttatccatgattctggaactcattgccacccaaataaagctgaagcagagatgcttaaattgttcccttagtttcaaaaccatatatttaattacctattttatatttcttccaagatgtttcaaagacacctcagactcaacttaagcctaaatttaaatttaaaacatttataattattccctcttgtacccccagacttcttcagtgctccctagctcagtgaatcctactacatccattgagttatagaagccaaaaaaaaataagactcatcctcaacacttcttttctcattaagctctattgattttattgcctaaatagtcctggaatgtatctgcttctttctgtcactgtggtttctccctagtctaatccaccattctctctcacctgtagcattgtattatcttctgaacctcatctccttttgcccccatctgatctgttctctgcattggagccagaaaaatcttattgaaaagcacatctaataatgtctccttccttttaaaatacttcgaggactttccattgaatggatagaggtaaaatgcctgacagacctatatgcatttttgtccctgtctcatgccatgcttaaccgtattactttgcagttccgcaaaaaacatatcatgagacacagattttgtagggcatttatttggaatatgaggccaggaagtaggagtgagggaataaggagaatgaggaaaaaacaaaataacacaagcaaaagccattgtaagagtgtatgattgagtttgcctctctagggaacggtggtctgatttcatagcacatctagaaagtctgcagattaggacccataattatatgcctgaagaataagcacctagttgcatatatccactggctccccattgtttgagggttgcactcacttgtgtttagctcccctgcatttcagagccagacacgtgcacatcctccctgtctttgcctagttaactcctatttatttttctgaacccacctcattcctgtgacagaaaacccctgcctctaaatgaagcaggttcttccagttttctcaagaccacatgcctctactatacaccatatatatcttctttgcagtgctgattgctgtgatgagtttgcattttttaatgattatttcatgaaaatctttctgccctctggactgcaagcttgagaagaccaagtttcatgtcagcttttgattttcattgccttaccagcacccaacctaggacctggtacataaaatatgttcaatatattttcaacaaatgtgtaagtataggtgtgtgtgtattaatatgtgtgcatgcatgtatatttataaagggaaactttgaatttttagagcttaaatagattactatcaatatctaaaaaggttatcatttttaattcaaatttcatattctatttttacttattgctttcttttagtgcttacatagtcgaattataccagaggcatctgtttaaaaaaagtcatacggagaaaaaacagagaactcttgctttacattatcatgatttatctgacagcttatagtattggtggcacttttctgtagaaagttatcgctaggcagttgctttaataaaacagagatttttgagttaaaatgggtaatatcagaccataaaagacaatcctttacaatcctgccttattcagtagaagtcacattcgttagtgttgagcaatttgaggacttaggtacttacaaatatatatatatatccatcccctaaaacaccatgtccaaatttttgtttcatgaactgggaactgtgacttgataacaggaaatatgtggcaaaaatagatgagtgttcagtctctggggttttatgctgatataaaataataacaaccaaaatgggaatggagaggcagatggaaatcaacaaattatttttaatgaagtaaaatacttccataaaagtaagctaccagttggaagttatcactatttaataaatgttttttatatttctagttaccatgttgtatgccagatgatccagcattaattcaacaaataatatggtacccttggcaaatagaatggtcatcatggagatggacatagtctccaccttcaccgggatggttgttattgctttatttaaaaatgcagttattttctctgaaaacatctatacagatctatcatgtcctgagctttttctaatttcttggaagggaagccaaagtagcatgcatctaattcagtctcagacctcagcttccaagagatgttattaactgtggtgaaaggattagtaaaatagtaaatggattatgagatagttgtatctgtgtcaattagtggttgctgtcaattactagttgcttatattcactttctctcatttagggagtgtggagagtagaatattaaatgtctggtgggcacagagtctcttttcatctggtagttgtcttagttatacacggggctataaactgaaaatggtgtgtaaccctttaattgaagactctggggtcctaaaataatttcctcaagaacactctggcccatagaataaacattttgaaaaatattttctttggtttattgcatatttgaaatcagataatatctgtcactccaggatctataaactcttgcatgtgggatatttttaggtaaagtgatttttttttttttttgaggaataccaaggggatagtggatttccatgaacttaaggatcacagtttttgttaagccgaatacccaacttgaacaaattttctatttttttgttgttgcttattgacagatgtgccatgaaggtgtttttaaggtctcatgaccctaaaaatggcttacgataagcaaaagtaatgtcagctttgtcctgaggggatcttgattcacttatcagctgaaaacagctgagcaatcaaagcacaggttcttccttggtggaagtgacaactctagttcagaatcttccaatctgaatctaagatcatccttagaaattagggtgggtggagaaaccagagtgatgtgtgctggagccaatactccatcagagtgggagagtccactctttcctgttgctttccccactcaggccttgggctattttagatgaggtcaccttagccatgttctcaccactccagctttgggccatctctgatgagttcacctcagccatgttctcatcattcctcctctggggcatttcggatgaggttaccatggtgggcacatttcttgcctcatgtactttagaatgccatgtatgcttttaaaatcagagacaagtgcctaacaacttcttatttatatgtttttaggttagatgtaaaatgacctgagaactgcagccctcatgagcattggctacgtgaatttttgattaataaagtctagtaaattcattgactatatagccttatctaccaagaaaagataacttaatttttgaaaggattacttagcttgctttggagagggtcaaaatttagtagaaggtgtgtcaaatgaacattattgctgaagtaagtctgaaaaattcaaaactgttgatggtgagaactgaagtgtttattatattaccctgggtacttttctatgtctattttcctttggaggaaaacatagttctaagaatctaggaggcctgtggatgtatgaaattaagaggaaataaatattctatcaataggaagaacttcaagaaaacccaaattgtccatattctgaacataacatttgttatatgtgttatactcaatttagttgcttttgtttatctgagatttctgtagctttcaaaactgatctcttaagatttactagtaatgtgagttattaaggggggcaaaatttcattaattcattctgttttctaaatactttcccttatccttgcctctctcatgcagtctttcattgtttctctcccatttattttacaagaaaataaaaaatcttactgagacttttaggccttacatgatttggcatctccagtgaccagaaacatctcctgtctcaccattgcttactaaactccgtggcttccatcaattcctaaattatgtcaagcttttttttcatatctgaatcttgctttctgttccctctttctaggttactttttatgtatgttactccttcttctggtctgagcttaatcatgtcccctcctcagaatagtattgtctgaccacttttctaaattcaacatttcatcttatttttctcacagcatctgtttattgtcttcattgcatttgacataatttatgatttgtaaaaatgtgttggcttttctccttaggtagtgagcttcatgacagtaggaaccttatgtatcctgattattaattatatccctggtactaatagttagtttgacatatgggaggttatcacaaaaattataatgtatgaatttcaactgtaaattggaagcttgtcaagccccttcatggttagtgactgacctgttttcctcaatcttgatctaatgaggctttagactactgctcctagctttatgaaaatatttctaacaaataccatgagaacaaaaaaagacaatgtttaaattctgaatcttgacaatgttatactcttttataagtgatatgctttggctctgtgtccccactcagatatcaccttaaattgtaataatcccacgtgtcaacggtgggaccaggtggagataatgtttcccccatactgttctcgtgatagtgagtgagttctcgtgggatctgacggtcttataaggggcttccccttggctcttttctcattcttctctctcctgccaccatgtgaagaatgacatgtttgcttccctttccaccatgactgtaagtttcctgaggcctccccagccatgcagaagtcaattaaacttctttccattataaattacccaatctcagatatttcttcatagccgcatgagaatggactaatataatgtttattgcaaaagatgacatttttgaattaaatatctgaaagaaaataaaggtgtcttgtagagttttgtttccttcatttgttatcctaacataatagaaataaagaagtaatacaaagttttaggaaaacatagcaaatgaataatacagttatgactttaaaaggaaatcactttcagtaacagtaaattaaaatcttaattattatatttcacttctctatagcaaattgaaaaacaaaacaagcactgtgaaacaaattagaaattcagtcgtaatactctcaaatgtactaaggaatttagaagagtaaatttcatttagtttcaaaagattaaaaagtacaactttggacaataacgttatttttcttaggtaggcattaaagaaaatagatcccatatgtctctttttaaaagactgtatctaggccctggccccggaccctacagccatcaagatgttgatgcctaagaagaaccagattgccatttatgactcctttttaaggagggagtcatggtggccaaggacatccacatgcctaagcacctggagctgtcagacaagaatgtgtccaaccttcctgtcataaaggccatgcagtctctcaagtcccgaggctacgtgaaggcacagtttgcctggagacatttctactggtaccttcccaatgagggtatccagtatctccgtgattaccttcatctgcccccggagattgtgcctgccactctatgccgtagccgtccagggactggcaggcctcggcctaaaggtctgaagggtgagtgacctgcaagactcacaagagggaaagccgacagagatacctacagacggagtgctgtgccccctggtgccgacaagaaagccgaggctgggactgggtcagcaactgaattccagtttagaggcgaatttggtcatggacatggtcggccacctcaataaatttggagagggttattttgcattgtataaacatccagccaaaaaagcttaaaaaaaaaaaagaaaaaatctaaaccctcactgatttcagatttattaaaaaaataaacacaggtaatttccattttctagtgtctcctttgctgcgtatttcttttgtttaaccagaagatcacttgtgccactagatttatagaatattaagtgttactcacttcagtatttgtaatgtcattatccattttaggataatttcaacatttgtttattctggaaagcagaagtaatctgcattcagatacaatggcaattccatgcccagaatgcttccctgagcttcacggcttattaaagcatgcagtcctgtatttccacagccatactaagtagctggattcaggcctgtgaatttggtaatgctcagtacatttcaaaacgtggactgggattgaatatttaggtaagattgacttaaagataattagttcatatattataacagatgctttaaaggagtttgtgactgagcaaatccactgggggacccatgcactgtacagcattttaatagcttcccatggagctggtttttatccagctaggctttagtgtgctgccatctccttgtgtggagaggatttgagtctcactgtggatcctatcattggaattactctaagaatatcatagaaaatactgaggatctctttaggatttcagtatcagagatacttgttctcatccttagataagtactattaaagtagtttttattaggtaaacactgcaaatcttgaaattgatcatttttttctctctttaggttggcttctataactctaagaaccaaatatgggggcccacttataattgcagtatttcatggcatgtatctctgtatgaatccacctatgctctccatcttactctcctttttctatctcctttttcaagttcatattcaattcattgtaccttgcttaattatatgctttctgttaagctgacttgcgtgcctttttgaaatgaggtagattattaattcattaattactgtatagattgcttttctggctcattgtaattttcaagtcattagcacaacaggagaatttataaggtatttttgatatgccattagacgtatcaaaactagacattgggaaggtcttacactcttcatatgcttatgtaccttatatttgagttaattttcttaaataatttctactacataggaagctgctgaaaaattttaaagagtatttgatagcataactaatctagtacaaaaattaattaataatcttggaaaagacatcattaatgtttaggtagatattccatgccatcatttgcataacaatatcacattatgctttatcttcatattcaaagagttttcaacatacaaagagattctattataaaggtgtatttataagttagtcatttagaatgcagagttcattttcatgaacaatcaagtttctaaatgacagctaggttagcccataaaacctgttttgcccatagtatataagaaataattttaatttacagtgacaaattacagaaaatattattttacatcttaaaatagaaataaaagcacaaaaattaccttattttaattttgaaggctaagacaaaaatggtataattaggaaatcaggacgtagatacgcaggttcttgtagatgctggagagaaattctgggtatctttaaagggaggaggatttattgtactgtgtgatttcactccactgtatattagttgtcccttctttttataaatatatcattaatggtaggtgcttttctgattatcaaggaggattaagttccctttcaacttaaaaattaaatgagtaacagaggagaggagcagcaaaagacagagtaagtgaattggtattcctgagataaacagatgggagctggagcagaggcatctgagtaagggaagtgcttacctgggcattggacatgggagagattttctgaggtggctctaaatgagccataaactgctgaaatcatgagggtagagaggattcatgtgttgcacagaactcccaaggggaaaataacaactgcagatgaagggatatggatcacacaggtccccacgtttcctgtcgggctgggggcagggtggagtgagggcagggagggatcccgcgtagatggcaagttctttatttccaggtggtggcaagctgggtgtttgcaatcttggaagtgcttatacttataaaactttcacttactctgggggtatctgatactataagcatacagaaatgatgcagaattttattttaagtataaagttctgagcctggggccaggtacataggaaagtattaattaattttagttcttattattttctggcatttaatacaattgtcagtggaagttattaatactcactatttattattactgaacacagtcctctaaatcatgagttaagtaaatctaaaacaaaatacagagtactgtttccccatcactctgccccagctccatttaggaccttgttccctaacatgcaccatccaccaggccttttggttctttttaaccttttagtttcccttccttcacattattctgagttatctgctatccctcccagaaagtgaacatatgccctttaattactctgcctccattcaacgttttgaacctttcctcttcttccctttaccagccaacaactacaaacttaggtctccacttattattgtcacatttttactagcaatttacaacctcagctgttcaaaatcgagccctgattcgtcaacgttactgaaactgctattatggaagtgaccaaaactctcctttgtgcagaatttaatagtcttttctctgttcttgttctctttgatttttttgcagtattgcagtatcgaggctgttagccaccttcttctggagctcctcctcattgtttctctgagacctcctcatcgcacagctcagtctattgaaatcttgccctttcaggttccatcttagatgcctcctccttattggacccttcctgattctcccagctgccctcaataccattttgtctttgcctctattggaaagtctgttttcatctttgacatatagatatttgggtattgttaagatctctgctctggattctgagaatgaggttcttgggaataggaaattgccttacatttacttactgagtaaattcccaatcaacagttgctgaggactggctttctttctccatgcaacctcctgaaacattgccattgctgtacattattaatatttgagtcacgatatctatacctgaggtttaaaagctgacgaattgctcatttgattgccagcatcataccccgactggtgagtgtgctccatttttggtgaacacagaattttatacatttatttcagtgagtttactgccccttccttcaaagtagttctcacctaaacttgttttttattcccaagatccttattatgaaatagctgtttcagctcactggtatgcgagagcaagtctaatagcactgaatcctgacactggttctgtgttccagctctcactggttcctctcctggggtgctttttctctgactgcttttttaaggccaccaatctgaaatgcagtttccatttgacagagctgtagatgagcttactctgaaaacacactacttgcccttgggtctaaggtgctcatttgtagtccccgcacataaacctaggagctccttactttgcaatctgcaggtgctcagcctattgcatattggaaagaaatgttgtcaacaatgaaaacaagtcagtaaatacttaggcattttctcactagtaaattgctgcaatctgaatcatcaccatgttctcccaattcttttcccattccatactaggtagatttatgtgacatccctgaatatggcttctgctggtggctgctacctgaggtctgttctcctgccaccctctccgctcagggcctcggctggttcacatggcctcctgctggtgaggctgatcacttccttgcctgggacccttattaactctgcaaggtatccacagccttccccaagagagattggcagtcacttttatgcccgccagggtctgtgtcatgctttcagcacaaccctccacttattccgtcatgtagcatattagggattccctcctctcgaacttatctcctctcaagtgtctatacaagctaagaagacttactcaggagtggggtcatggtgtctcttcactgagtgacagattcttctttctcagctcctttgaaatagataagagctagtagtactgactcaatttataagatggcaaaaaactaagtaaataaaaccatgccaaatcaaaaacaaaaataaaacccacctaccctgatgtcttttaaagaagccttttgatcataggattggacattctctcacttacttactgagcatttatttctcaggtgtctacttagggtaaactccgcaaaagttcctggtaatgctttgcctatgtcagtgtggaacttggcctattaaatgacaggcagacaggccaggtgcagtggctcatgcctgtaatcctggcactttgggaggctgaggtgggtagattgcttgaggccaggagtttgagaccagcctgtgcaacatgacgaaactctgtctctactgaaaatgcaaaaattagccagatgtggctgtgggcatctgtagtcccagctactggggaggctgaggcacaaaaactgcttgaacccaggaggtagaggttgcggtgagctgagattgcgccactgcactccagcatgggagacagagcaagattccgtctcaaaaaacaaacaaacaaacaaacaaaaaacataaatgacagacaggtaagctaagcacagaacaatgtcagagtgcagttaccatcgagagcaggaaaataacagagaacagagaaagggggaaatgagcttcacaggatggggttaggaccaaagaaagtgatccaggaagtggatgttaaggaatgaatgaaaatgcagagaaaaggatgtaaaggagatctttgtgatatttatgcaagtcttctgtattttcaaaactccttctaaataaaaagttaccacctcaccaggccaataaagaggaagctaagagaaaggtattcacaacatacagtatgcaaaaaaacttgtcgctcatttggtgttactagaccttcagagtcacggggaaaccctggagacaaagctggtgtacatgcagttgaatctggatggatttggatttctaaaagggaaagacagaagagttctaattaatggaatggaatgatgtgattttctttttagaaaagtttctctctgtgactttgtggaaaataggtaagaggtcagggatgcatgtgaagggaccgtgatctaggtgaaaagtgatggaaatctgtatcaaggaggtggcaatatgactgacagtaaaagaagaagttcttgagatacttagaagatggaattaatagggcttagtcactgatgggatttaagagagaaggaaaaggatttaaagatttagacttatctggccagagtgattcaaattcatagaaaaagtaacctgtgagaaggagcaggttaaaaggaagaggaagggaaccacttctgttttgagcagcctgaatctgcactgcctatcggatagctgagagacggtgtctagtggcagctgtacatctaaaacccggacttgggggaaagatcacaatataacttagagatatagatttgaaagtcattaatagatttagactgtcttaccctggaatccatgaatagtcctaaggggttcacaaacctcagatatatgtatatactttccccttgggctaaggatctgcactgagtatttccagttgccttatcccacatgcatatatgtgcatgagatcacttatatcccttctctgtcctatgtctatctatgtccccaagaggctgatgtgtttgctggcattacccgactcccttgccatttcttatggtgaggcattggcaggagatgagagggaaggagaaggaaaaggttgggatattcttttcccgccttccccacattgggtcccatttctggcagaggctgtattcctccaggactatggtcctgtccagagtcccctccttcatggagccagcactcccaagcctgcagtaacacaaggccttcagtcccagcgggtcccactttttgctcttgccgtcctcttggtgatttgacatgcttttccagttgcctgaaacctgcccatacatcatgaggagtcccttcattatggtctttgtaccatctgaggtggattgtttcttgccagattccatgtgtctttttttggtgctctagtatacacttgtgggagaaaaaaactcttacaagctatggggacggctgaccacacccacagattgtggcccgtaaactacctgtgaggaccagcaagtaccttcatggatccttatttaccctaaaacagtttctaaaatcttagtgacaagaagttgttaccagacatcccaggtgaaactgcacccagtgagtattgtaccaaattcctaggactggcctcaagtactgctgagcttagaaggggaagagaatgtgagagttcagaatctatgaatgtgtccagcataaagagggctgaatgttacagtgatgccttcaatctaacctgaatgttcttcttgtatttttgatatttattttttttctccactttttgaggtggagagggggatcaggatggatggaatatttgatagacaaggaacccaggaatttctccaccctgtccagctaaaactatactgcttggcagagttcccaagacggcactgtgcaaacaatggcagtgaactggatatccaagtgctgccttaccagctgaaccggtacctagtgttccagcaaatacttcagttcaaaacttaagcagtgcctcctgccctctttaaatttgagaatacatatcaagcacctggagtgcaggttcttacattttaagaaacagtgaccccactcattagaaaatgtgattcaattagtagcttaggctctaaccagtcagattaacaactccattctctattccctccccgctttctctttctcccctacacccatccttactctctctgaggacacacaggagttggcagaaatgggtctggtatgaggagagggctgaaagctccctgtccctggactcgcctcagcttctcttctgccatattcctgccattttttttttcctactgactctcctcgctggcacacttttttcttcctgactttttgttgaaaacgaagcattagataacctgggggacaactgaccttgtatgcctatgtttacaacatgttgccacccataggtagccaagtcagtgattcatcaggagttagtagatagggtagctagtggtggtgagaatagaaccattcacctcttttctcttccagaggaatcagggggtaagatattagggttgaaagggaccctagggatcactgggtttaattttttttaacattttcaaaacgccttagaaacctgtatttaaataaaatctttaaaataaatcaacatatgaaacaggccttgttctggatgaagtaggttggaagtctgagtccacatgaaaacaccatggctccttcccattgtcactattgcgtggaggctcctgggaaccctgaatgcttcatgaagtccacctcgaaagccttcagttatgaaaaccttatgaaaacctgctgtaccacagacttaaaggacttgctcacagaagttaaatggcctagagaattggagagcctcctaaatctaggaagcagcaccttaatccacattacattgccttcctcttctctgccccttcaaatctacaacattggattcaggatcacacagctgacaccccattcacattgccctcacacttacgattcactagaaagctgtttatctcagaagacatttttatatttaaaatggtgtgtgtgtgtgtacactgaagagtgtagtcattataggtttattctcacgggtagtcggccaattctggacagggagtgctggcttacactgttagccaatgagtatctgaccatcgcccatgctatacttccctcatttagaatggcacccctaagttatttatttactctggcatggtccttctgtctgtgattgtaactgctctggcacacggttttgactattattagctgaaaaagagaatcccagtgatagtgctggaagtgctgataaagtgaacacttggtggtaaaaggcaattttatggcagcgccaggaagaaaaagagggtcaaattcacaaagcaattagagattggtggaagtcctttgagatatgagggatataaacctcactgaagccttgtaagattaaccaataattgtatggacaatatctggaaagaaaggaaaactattgctgaggcatatctccagttaatggctattgaaagaaaaagaaaaatggttgcttatgtttgatattgaagacaacatattcaaaatgactgtgctccaaggaatccatgtaggatagattaaattagtttgtcatctcaaggagcttgttcttaaagttaagtgttgtactcatttatcagtccaggtaaggatacagtaatcaacgcaaaagaaggcaagatctcttttttcttttgtgttgtcatatactcaaaacaattttcagctctattccaagtattggcttaaacaattctgattatatcagtttaactggactataaatgatacttaaatatttcccagtaagccgttggtataacatcataccaatgactggaattttctgatcttcatggttggtcacacagttagatgtgcgaacaaacattctcgtataagagcaaaggccaggcgtggtggcttacacttgtaatcccagcactttgggaggccaaagcaggagaagtgcttgaggccaggagttcaagaccagcctaggcaacataacaagatcccatctgtaccatcaataatcaatcaataatgtatttatttattagtccaaatgaaaagaaataaacacttcatttttttaatagtacagttctattatatttttaaaatatagttgccatggtcaacagttatccagaatccgacttggtataaaaggattaatttttttttgttttttgttttttaaggaaaaacactagctggaaccaactgtgtggacagtgaaaatgatgaaagactgagagaaactttagaaatgcaagtgagggagtaaggtgctaagaggcccttagaagtcttggcagatgaaagatactgagtgtcagtttgcctgaagacaatacatatataaacagaatgggtttgactcagattccaccatttattgctgtgcccctaggaacccactcagtcttactgagcctcagtttcttctttggttaaattggggtaaccatacttgtctaatttactttctttcttttttttaaaaaaaattatattttaagttctggagtacatatgcagaacctgcaggtttgtcacataggtatacacgtgtcatggtggtttgccgcacccatcaacctgtcatctacattaggtatttctcctaatgctatccgtcctctagtcccccaccccctgacaggccccggtgtgtgattttcccctccctgtgtccatgtgttctattgttcaactcccacttataagtgagaacatgcagtgtttggttttctgttcttgtattagtttggtgagaatgatggtttccagcatcatccatgtccctgcaaggacatgaactcatccttttttatggctgcatagtattccatggtgtatatgtgccacattttcttaatccagtctatcgttgttggacattttggttggttccaagtctttgctattgtgaatactgccgcaataaacatatgtgtgcatgtgtctttatagcagcatgatttataatcctttgtgtatatacccagtaatgggatggctgggtcaaatggtatttctggttctagatccttgaggaatcaccacactgtcttccacaatggctgaagtaatttacactcccaccagcagtgtaaaagccttcctatttctccacatcctctctagcatctgttgtttcctgactttttaatgatcgccattctaatttactttctagggttgctgcaggaacccagtggaatagagtatgtgaacatttcccaggaatttgggaattgatatcagttttatttccctgttctcagttggactgtgtgtaatcttaaagacccagccagatatgaacctttccctttttaacatttttaaagtttttatgggatctctttatggtgcctaggcttgtctcaagcacgtggcctcaagcaatcctcctgcctcagccttccaaagcactgggattacaggtatgagccactgtgcccgacctttcctctttttttttgagatggagtctcgctctgttgcccaggttggagggcagtggtgtgatctcggctcactgcagcctctgcctcccgggttcaagtgattctccttcctcagcctcccatgtagctgggattacaggcctgcactactgcatccagctaatcctttgctcttttaagagagtgtttgattgcacatattcctgagtgaacagccataaagatcagaaaattccagtaacaataactttttaaccaacaccttctaaagagcaccttgaatttatttctcaataaagaagaagtaaggaggttttgaaactcaagaaaaggataaaggaatgtttgagtttgattgagaccaggagacagagtttaagataattcttaatctattattaatagtgaggccttaggcctcatttaaaaaatgacctccttatagaatatgaggtggtacccttaagacctaaccattgatgagcttacaaaaagagatatgttttcccccatcggaaagcttccctctcagtgcagtttgaaaaatgaaggtctaccccagggtagtcatccttcatgtaacattaaatattaaattaaattggttggttgtagagccagtgttttctttgaattctttagtgtaaagaggtatttcttctggaatattttctggtagtgtatcttatttctttacccacctgtgatgtagaatctcttctgtcttggcaggaagagaaatttgtactacacttatttacttttggcaaagcagttcctattttaacacctacttgaaagtgttaagacttttattttattgttgttgtgagggggatgaattatttatacaaatttctccctttaaaccagaacaatgatacactgctctgtaaatatctgttggaaaggctttcagttttaactcatcatattgtaccgcacctatcaagtcctttactgggttttgcatcagagtcaaaacactcaaaaatgattcagggttctagatgacttcttagctgtaaaataagtttgcctttttctcaccattttggtgcaaccttacatacacatctggttgagatcattttcttgaagtcaattgaaacctattggaaacacacaagacatagcacaaatattgcatttttggagtacggctatgctgtgtgtcaaaaacctaaaatcatttatttctataattgagctcaaccatatgaaaaagtattagctacaagaagcaatcagcattatttatgacagagaaaacacagaaactaattaaatgtccaatgagttacccgaggaaatgttgaaaaaattcataagaactagctatttaaaatgatgctgtaaaaatatttatttaaaatatttattgacatgaaaatcatttcatgaaattctaaataaaagaaaaagattgcaaatagtatgaatatgtgatctaattttggtattaaaatatatattatttatttaaattgttaaaaatgcatagaaaatggtatgaaaggacacatacgaaaatgtgtttatctctgggtagtggaaatctaagtagtgtttactttttttttctttttgcctatttatttactattttgtgttttggattatgctgtggtgaacatatgttacttactgcataaaaagtaagaaaaactgttcaggatgatagacccatcttcaaataggggactacaggagagggaggtggtagaaattgaccattctgtagggggaccattctgattttaggatttctctttttagctttggtaaaaataaacaaaaaataaaactatgtcttaaaatataagtataaaaactgtgtttgttctatatgtttatactgaggttcaaatagctctcgtagatttacactttttgagtgactaatctctacatttttagtctaattttttcatttgctttttgaaccaatataggtgatattcacttctagaatattttatgatgatgtctgtatcacaaaataatagttaaatgcattgcgtgctgactagatctgactagattctaggcctattctaaatacttggcatgtatttacttgcctaattctcacaatatcctataaggcaggtactattattttctctattttacatctggatgaagaacctgaagcccacaggagctaagtctttattggaagttgtaaaacctgtggtagatctgggatttgaatcaagcaggctggctccagtgccatacaaatatgtgtcacatatgctacattatattttcatatttaccaaagatgttatgatggttaattttctgtgtcaacttgactagatcatagggtgcccagatatttggttaaatgttaactcttggtggctttatgatggtgtttctggatgagattagcattggaatcagcagactgcataaagctgattgccctctccaatatgggagggcattgtctgattgactgagggcctgaatagaacaaaaatgtagaggaagggagaattcactctttctgcctgatggcttgagctggaacatcagtcttctcctgttttgactggtactagacttatatcatcagccctccagttctcagaactacactactagcttcctgggtctctagtttgtaaatggcagatggagttttttaacctccataattacggtagccaatttctattggctttgcttctatggagaaccataacacagatttgatgaatgaaaatgctcatttaaaatgaaaggaaacttcaaacaccatattataattataactataaagtaggtaatatatttttaatagaagaacaaaaacacccaaagaattttattttcacaaatagcttgtaaagaggtttaaaattttaatttgtatttttttctctttttgttaatatgtgtgtgacacattttgtatgaatgtcacaatataccataccctaaaatacatcatttttgtgccactggttaatttaatatttcttttctttgtaatatttatccaaaaatacacacacacacacacacacacacacatatatatatatatttaaacatatatgtttatacttatcctatacacacacacgttatacttatcctacacacacacacacacacacacacacatacacatatggtgtatatatgtatgtgtatatatatatgtatatgtatgtgtgtttgtgtgtgtgtaggataagtaattctttttttcttttttgtatgtaacccataaaataattagaacgtgcaaactcactctgtgttttcaaaggtccaattcattatcacctcacaccttttcaggaaagacagttatcaaaagcatctcaaatttaggctttcactgtgtaatgtcaaagttcaaaaagcaggaaaagaaatttatgcttacaaacatctcatggtgcatgacattttaaaaagcgtccgccatcctagaaagagacaataaatgtttttacactttaatctttagactgttaaaaattttcacactaatttcctttcacaggcctaaaaatgtacttttccccctctaccattttttcccttatttatatcattttatgttggcctctttcttttcactttcttccattcttttatctctttcatttttctccttctaataactttttatccatactaataatatagatgaagatagtatatgtgtattagttcattttcacacagctgataaagacatacccgagactgggaagtttatataagaaagaggtttaactggacttacagtttcatggggccagggaagcctcacaatcatggtggaaggcaagaaggaccaagtcacatgttatgtggatggcagcaggcaaagagagagcttgtgcagggaaactcccgtttttaaaaccatcagatctcctgagactcactcactatcatgagaaaagcatgggaaagacctgcccccgtgattcagtcatcttccactgagtccctcccataacacgtgggaattatgggagctacaagatgagatttcggtggggacacagagccaaaccatagcagtacacaaaaggtgttgctaaagatttttaaacataaattgacaatacttttaatgacagtgagtcagtgctatttttcaagaataaaaagagaagcaatgccagatttcccccagtgacataaaagagaaaagtagttattccagaaaagattgtattccagtttctggtaaaagaaaaactgactaaaaagtggcttaaacaattttttctctttcttcatataacaagtccaaaggtaggcaatttctggtattactttagcaactccaagacatcagggtcgaggtcagtatgattctcctgacttttccatctagtggtgaagtggttgtttcagcttcagccatcacacccacattcaaggtaggatgaaagaaatcacatttatcaggacagaaaaatggcgctagaaatcccctgcaaatttctatatgagctcactgcctcacccatgctgcagggccaattctagctgcacaaaagactgagcagtatatttttgccactaaaattgccaactgaataataaatcaggtttcccttaaaagaaaatgaaaactgaatatctgatagatgtattactagatatttctatgcaataaattctcccaaaatctagtggtaagaagcaacaaacatttactatcaagcagtttctttttctttttgaaccctttgaccaacatctcatttcccctatttcccagcccctggtaaccaccttttcactctctgcttacttgagtttgagtttttagacttcacatataaatgaaatcatatatttgtctttctctgtctaatttctttcacttagcataatgtcctgcaggttctttcatgttgtcatgttatcacaaatgggaggattttctttattatggccaaataatattctattatgtatacatatataaatggatatagaaaataggatgtgtatatatgtcacatttgcctctttcatcacaatatgcctcaagtgatagagtgactcaccaaagggcttaactcacatctaatatatagttgacttcattgtacagtaagtctgacatcaagtatggtgcctgttttaatttgctagggctgccataataaagtaccacaaactgaatggcttaaagaacagaaaatcattctcacccatattaatgtgcacacagattgaagtgtccttatgtgatgtagctatacttactttttggtgtcaaacatcttaatgtcttttttaaaactatgagtcagtgagaactaccacctgataggaaagcatatttagattctttttcaaacaaatctcattgggtctaatatataatagttttacagattgtatgtcttatctttataatatacatttacttgattactggtgtttttatcccaaagttacagttctgtttgttatcatttgatattatcatagaggaatagcctttaaagaccttggaagtagagtattactgcaaggtttgaaagaaaaacggcagcattaaagagtgtcagctcttatatgtatatgctttttaggaacataaacttagaacattaaaactcttaggtcatacttgtcaataaatgatttttttctcaacagtactttataaccttttagaaatttgccaacaggtgacaatactccctaacagtctgctagaagtgtcagagctcaggatatctgctttttaattgccatattcaaggtctaattattttctctatattggggtaagagaactgtaatgaggaagtaaaatcattaaacaccagtgagtaagggaacagagtcttcttgaattctgatgtgaattagcttccccagcagagctttggctgtggataatttctatctgaatgtctccttctcagttatttgagaggacacataaaatataaaggaagactgctcaactcttgtggtctttaaagagaagggaagacaatggattaaaaggctattattacatctagacttatagactgttaatacttaagagtttattaacctcaaagtgtcaaaatgttctataaatgagtaagatactatgtaaatcaggctacacatatgataaaagttgtcattagaataagtggcctagaaatatataatactacacagttttcatactttttgaattcatagaatttagacactcagattcctttaaaaccaattttgctgctttatttattatttatcatattgcctttcacagttattcttttctgtaattctcagctgttttagaaaactaccacaattaccaaactgtctcaaaagcaaaatttgttgctgtagctactagaaggctaagaaatcacaaacatttgattctgtaagagtctatgtgtgtgcctgagtgtatctcatgcatggttttatgataaagcatgctaaataaattgtttatatttgtgtttgtgtgtatatgtttaccacttatgaaaagaacatacccaatggcagagattgaattaagtgctttctgcatgatctcatttttccttatgacaattcttgaatgaaggtattgtacacatttattagctaacgcggtgggcttagcaagtggctgtattagtccatttgtcttgctgtaaaggaatacctgaggcggggtaatttattttaaaaacaggtttattttggctcatggttctgtagactgtataagaagcatagtggtggcatctgtttctggtgagggcttgtagaagcttacaatcatggcagatggggaaggagagcaggtatttgacatgatgagagaggaagcaagagaaagagagggagtaccatattcttttttaacaaccaattcccacgtgaactagcacagcaagaactcactcattactgaggggaggacatcaagctattcatgagggattcacccccatgtctctaacacctcccaccaggtcacaccatcaacactgggggtcacatttcaacatgcgatttggaggggacaaacatccaaactacatcagtggtttagctgggatatgaacctaggtctgcctgtctctagagaccattcatgtaagtacatagaaaccatattcttccttgccactagaaaaaaccctctagcaatttttgccaatgttgattataaaaaattttatatggacccataaagaaaagagcaaattttgagcctctctgggaactgtgaaaaaaaaagatctgtcctcatatcaacctttgacaattcaaagagcaaacagaagattgggttacttctgtgatcacactgataattccagcaggcaaatcttagtcacaacaagtccctggagtccagccaatctggctgctttgatgctaggctcagtagaactgaaccaaatgtgcgtgggaaagagaagaaccagatattgccatgactgctcatcagtcaggatttcagagactgaagaatgcagactgaacaaacctgaacccatacaggaaaaatgaacatagtaggagcaaaccatcgccctctcatacagcatagggagggattttctggagccaaagagtgggtttggggtttcgtagtccaaagtctggactcaagggaacctcagataaccagtaaaaatgatcatccatatcttgggtctcctaacaacttgacatgagtagtttaatatgttgaaacttcagtttccacccttgcaaaatgaaagttatattgttctcttccaaggctgttggtgaggttgaatgagataaggttgatgaaaggaacctcaatacagtgcctgatacacaataatgacaataattatatcataatcacagtcataatcacaataatgccctttctagccacatatggcagagacattggtgcagtggtcctcaaacatacgggtcagatttgtcgctcaagtctgtgatctaatgacatgatgaacccattagatgcctccctatcatctggatattgttccttgctttttccaagatctttttgaagatgacaatatattttcataatatttcactattttaaaagctttctgttgagcataatatacatattggaatgtgcaagtatcagttatactgcttgatgaaattttaccagctggatgtttttgtagccagtacccagttgagaaacagaacactttctccagtcactatcctcccgcaatgaagtgtaccttgggctaatagataagttttgcctattttccaaatttaaataaatagagccatatactctgtatatgtttacacctcacttcttttagtcaagataatggttgtgagattcatagattcattcatgttttgcatgtagtcatgctttgttcttttttattgctatgtaatattctattgtgtgactataccacaatttatccattttcctattgacgggcatttgattagcttccagtttggggatattatgaatagagattctataaatattcttgcacatgtctttagtgtacaaatggaagcattcttgcatgcctaggtttgggactgctaggtcatagtatgcatatgtttagcatcttttcgaaagcaagggtatcattttacatttccaccagctgtgtactgggttgttttcaatgattattgtgtgttaggaatcattcttcctgcatcacggttatttttaaagcatccacctgagaaaaatgcagctctactaagggctggttcttgtggacattagatcccaccaagatggctgagagcaggacgtgccctatgatatgtgtatgtgttagaggctggaaagctatcagaaccatgtacctctgctgctgttttatggcttcatatattttggtggcagtccttaacagctgtggatttatttttctaatgtttgcttggaaactgaaatgagtttgaaagcagcccgattcatatagaccacacaagtaagaagaagcatattagataacacaaatatgggctagagtggcgccagagaacaaaaaagaaacaactaatgattaggtaactagtggacccaggcatgaaatttagtaatatgctgtttaaacataaaaggctaagaaaaacttgtttgaaattgtagaagtgtctgacagctagtgtaaggaatgtgtgagtttccacgctgacatcctcccataccaacagcagtttcaacttatcaggtggccttcaattttagcaatgaggagaaaaatgggtaataaatatgagatcttgtgttaattcaaaccattcacaaatctctttattttagggaaagtcacgctaaaaccacaaaccagcaggaagaagtaaaactttcaataatgggttgagcatcgactgagcttgaggcctgacacgctgcattcccattttatcctcaagccaggccagttgtgtgttttcaccaacatgtttcccacagattggtcccagagatgctaagtcacttgtcccaagttccaaaagtttgtgaatgacagagccattttcaaattgaggttgagctgattcctcactgcttcatgttgcgagagagaagtaatagggaagtagtatgatttggcagtaaacagcaggcaaactataaaacattatctgatggacgacacaaacgctctttacatctctgtcattgcgccctgtccggtaggagcagctgaatgccatttggctctttcaccttctgctatctcaggaaggcaagctgagcttagacaactccgtgcctttgttgtcccctcacctcatgtctgtattcatctctgttcccttatgttgtaattttctaaccttttcccctcccatccagtggccttatctgaaaaatgaatcctcaagttgtccacagctcttcactaagacccggtctagatccaaaatgaattcagaaggctctcagccagcggggcaatgtgtggaatttatggtagtttgggggcgtaatcttagtgcagacaagtttcctttgccttgttggaatcacatcggagccatcaaattatattgcttctcaagatgcagttaaagtgatttgggatgtgctcctctggctctcccacttgaagagctttactgtgaagcttgagcttaaggtagagatgagctggtaggcccaggtgaggaaagtggttagattccttgtgacatctggaatcagtacttgactgatagagttggacagtactttcatgatcaagcattccaaacacctcatttaatgagggaagctccaaaagtcaaatccaagaatgccaagttagggaggagtaagagctagaataaaaatctctcaatgcatggtacagtcctctttgcttttttaaaaaagttattgtaatctcacagatgagtaaaattaagcaaaatgaagctagctggtttaacaaacttcattgtagcatcaaccaaaaatgtgtgagtcagcattaaattgggccagatttggggtgggagaaaaaaatggtcagatttcttccaccaaaaggcatcattagatgtcttcattccaagctcagagtgtacatacagcaatttgctgctcacagcacgtccacagcaaattatttcccttcgtcaatcagaattgtggtcgtctaatttgccattctcaatactagtcacgctttcactctgtgtaaaaattcagattttcttctctcttcttagacacatggcaccttttacctgcaaaaggtaattgcagtgactgtattgacatgtaatgatatattcacgagctaatcacatttgcatttcctccgcttgctactgaaaagctgcaaaggagtccctgtcatcatgtgtaggtcctcttccagcccagcattcacagcaggctggcaacaccaggcattcagtcagcaggtcataatgactctaccgctttctattattcaaaatggaatttaactgggaacttcatattgtattgtacacttaacccagttttcttatttgttataggtttatattgttaagcagtatggtaaaaataaaattctatttaccaaattctccttaacagatggaatgtttaataggccaataaataataggttttaaaataacttactaatctttatattctccgtattcttaatatccttcttatctactccagaccttttattttaaaactttagaatatcttaaataattaccagtcaatatttattacatcattatattctgcatttagctttattgcttatattttaacaaatgtaataaagacaatggcatatgcagcttgtagtttgttgctatgagccaggccctgtgttaagcaattagaggatctaagtgagtcctcaccttaactgtgtgaagtagatatcactgtcctctttttacagatgaagaaactgaggttcagagaggttgaatcactctttcaatgccacacttaaaaaagtggtcaaaccaggagtgatggcgagtgcctatagtcccagcaactcaaaaggctgaggtgaaagggtcacttgataccgggaattcgagtccagtttgggcaacttaagagaccttgtttcaaaaaagcaaaaacaaaaataagtggtcaaattaggatttataatcagaactatctgacattaaagtgctcttaaaagtgaaaacacgactgggcgcagtggctcacacctgtaatcccagcactttgagaggccgaggcaggcggatcacctgaggtcaggggttcgagagcagcctgaccaacatggaaaaacgccatctctacaaaaaatacaaacttagtcgggcgtggtgacgcatgccggtaatcccagctactcgggaggctgaggcaggagaatcgcttgaacctgggaggcggaggttgcagtgagcagagagcactccattgcactccagcctgggcaacaagagtgaaactccgtctcaaaaaaaaaaaaaaaaagtgaaaactcattattctgcttttgaaatggagtgacctttcttccttgttccatattcacatggaccatttcatccacaggaaaagaagaggaaattataaataccatgattcataatttaattactagtgaattgatagatagtaatgaaacaaaagtatgagataacagagaggaatgagagtggtattagtcagtcaaaatctattcagatgccagcaatggaccgttttcacaaaatctaggatctttataaaaacttttttaaagatagctgaactttattgattcaaatactaaaacttttacaaagaaacttttttagttttattttatttttaattgacaaatagtaattttatttaaggggcatacagtgatattttgatacatgtatatattgtggaatgatcaaatcacagaactagcatatctatcacttcaaatatttatgatatttttgtggtaagaacattaaacatcgtctctgtttgctgttttgaaatatacaatacattactattgactataatcactttgctgctcaatagaacaccagaacttatttttctcagctgcaactttgtatccattggccagtaatagttccccctaccccgccccacctcaaacctctggtaaccaccaatctactccctacttctatgagttcaacttttaaaagtaacttttcatggaaatctttctaaaatattctataggcatttctgtatagcatttaaacagatgacctcaggacatgacttgaaaaatccaggatttcactacgtggtggaatagctctggtccgttttcatttgtcttgagctctgctctcctgatgtttactctcatgtctgaatccacttggttcttgccttagtgacttctcttccatctagtgtgctatggaccatataacacagagttgcaaaaaaatctgtgtatggagtgattgggattctgaaggaaaaccttacagaggaaagtggtacttcagttatagctttttggggtaccagacaagttttacaattttgaaatactgatttatttatatttcacattgttcactacatataaatgcacatgtaagaaaatgatggtaaatgtacatacagaaaaattaggcatagaagtgtacaaatgagaacccatatcaaggagcttcttggcagtcaaaccaaggcaaaaagaggcagatttagttatgatttttattatcatagaagataatgtataacagccgtgaaagagctcatagaaagcttcatgtatctttttttaaaaaaattccctaagtcagagctgtgttgtagtgggctaaaatttctttttctgtttttctttttcctttttttttgagacagagtcttgctctgtcacccaggctggagtgcagtggtgatctcagctcactgcaacctccgcctcccgggttcaagtgatcctcccacctcagcctcccgagtagctgggactacagtcatgtgccaccacgcccagataatttttgcatttttagtagagatggggtttcaccatgttggccaggctggtcttgaactcctgacctcaagtgatctgcctgatttggcctcccaaagtgctgggattataggcatgagctaccgtacccagcctaagatttcttcttggtgttgctttcactaaaaaaataatcattagcagtaataacaactgaacaattatattaaaatactgtggatcaaataatgaaatagagagttatgctccctagggccttaactatctattcagaaagcaaagataaaactttatacggctagccaattcaagttagtatatgttgtcattactgaatttatgtaaattttagatataacgttctaaccccagtttttcaacttcataactaagatatgtagttgaagattcctcaaatgcttacgaggacattaacatcacccaaatcagccaaaatatgtcatataccattgaattggacacccacatctaatgactggttaatgcagatatgaaaaggccagccccttcacctcaattcctgacaactgtaaagtgtatcccagtttcagagacctccacagggttggcggaggcctggtgatgaccgcctctctgcccaacttctccctctgcccagtcctgcttccctcacttccactgtagttgttaatctcaagatcactccctaataaatttcctgattttctgtactccagtctctatcccaggtgctgcttcccctaaaaagaacatgccgcattacaggtcactttgtgcaagccactaagaacactgttcaagggaagttacagtctaatttacaagacaaggcacagcagtgcatacacaggctgaggggcaaacaaacccttcagcttctgaatgctgttacctctcagaagccagggagattgctgagagttgggggagccaaggaaggcttctcagaggaagcatcttttaaatattttcttcttccacccaaagcacctatcttggaatgtcaaatgattcaacactactacttttccatgtgcgtttgtaaaagtatataacaatttgagggatcatgttcttatgctgtaatctttctaaatcctctttctaaatcctaatgatgtgtatgaataccatagaagtagcaatagctcacaaaggcctgcaagaaggtagttgtgtttcctgcatagaaccctgttcaattgctgcctttctcttaagattatcatgtagcttttcaccttaagaaattaatatgctgtcatctgactaaataatgcttttggctgaaatactggtcccaaacatctcttattttgttgtgtctaatattttaccatctctgctcagcataacttattctcctcataatttcactttttctctgcttacactaacacgtggttttaaaggaaatattgatgattcatggtgataatagtacgtactttaatgaggttctgccattcatcatgttgttacatccatgtattataacactgaattgtagtcacctgtactggtagtcttcagtttggtttccccagaagcagactctgagattttaaggatttgagggtaggtagtttattagggaggtaactccaagtaggagagaggaaaagtgaaataaggaagaaaagcccatcaataaatgtatattatcaagccacttacaactgtgagcaagtatagcttaatccaactaaggaactctggtgacccctgtagaatatgtacctccctttcccacctaaaggcaagggatctgggctacttttacccaactattgtcagtaatctcttaagaactgttcctcttagacattaagtcctgagcactctcagtttcccaagtgcttgagcaaagtaaattcttgaagtcagagaaagctcttaggcaaaataaataaaatgcaggtactagcagtcaggcctaagggctctgagatggtaaaggcagggggatgtgggtgatgtcctgaaacatcatctacactggctaattaagagaaaacacaggattgcaatcacattgcgtagactggatattctcttcctcgctcctacagtcaatcacgccccaatttctgctgatgccatttccctgctagctctggggactccctttcctttgctgtttttgctgtcttctagccacatatgtctgctttcttgcctgttaataccccaagagttcttgcctctgagcctttgttcaggacggagcttgggtccctttgctaaaatgtgtttttaccttgtatatttctattgcagtccttctccaagctcactttctctaagatacttcacacatctttctgctatagttggtggcacttcattttagcttcattttagcacttctcataatctgaccttttattaagtcgggttcatagacatctctgtttctcactcaattgtgaatttctgaggggcaggtgctggcatgcaattactgtggtacccactccagtgcttcacatgtagtagatatttgataaatgcttgttgaattaaattgaataatttaaatccaaattaggtcagaaaaggatggtgttttaagtgggggggggggggcaccagattcagttacctggatagggaaaacatacacttgaattttctaacagcttgcactcaagctgtcattaaaattaaagtcctttattagatgctttcattgttgccgaaataatactccctgtgccttggagcagtagatgtaacagcctctcttagttataattttgtgacatcaggcatcaagcagtcgggaaattgcgagagctggtaatataactttacatatagtatatcattacaaatgagaaaacagggcctgcgggcagggatgctctgtaacatatttttctgagaagaaagaaaactcaatggaataacagtaaattctgtaaaaaacattttctccttaaaaaaagacagtgcccatttagttatcctttaataatttcaattaacttctgcatggcagcatgctaaaagaaacaaattgcctctcagtcagaaaactgtctgtctctccctgtcagtctctcatgaacacacacaaacacacacacacccacacacacacgcatgcacacaactctaagagcaatcattttaggagtctgggctgactctgaacactgctccaggaattaagggcctagactgggcaaatcactctgtttactggaagtatccaccatttcctctcctgtttcccacccatttctatgtttgcacacttgtaagctaatctaatttaaacaagaaaaaaaaagcctttaatgggatgataaccagaaaaaatgttcccattgtgtttaaatgaattcaaatgaagtcatattttgagggaaggggagagggccagtccccctgggggacttggagtcaagacagacaactgtgggtaagctttactggcaagcctctttcaatctatttcatagcttacatacccccgctcctctgatgccccagcccaaacaatgatacacagtgtgtcaggaggctgtagtagcctaaaccccaaattactgtgacttaaagtcaacgtagtattatttttgcttcttattgttgtgtttttctgtttttattttcaatctcacctgagaaggaggcagaccaggggtaatctgggagatccatgatcattagggacctagactccttttatcatctttctctctgtatttgtcttccatcttcagtgttgcctcatggtcacagatgacttgctggagcaccatcaatcacctctttgttccaggaagaaaaaagggggagcaaggaaaaaagattaaaaggacaatgcttcttcagtacatcagcagcttactttctcttggccacctctatcaaaaaacaagaatggagaacatattttgatgaaaatgcatattataaaaagaagggaagaatggctatcaagtagacaaaacacacagacatacacaatattgcttctgtcagatccttatgtggattgggttgcaaaagagtagtgacagcatgctttaagtgcctaaaaagtctctgtaaattcccagttctcttgttgatagtgtttggttcactcagagaaagatagagagagagagagagagagagagagagagagaatatgagggaagaggcctgacattttcttgagaactgaaacctttcttttaagatggcttgcctttatcaccatccgaaattctaagcactggatatttgtaccagactctaaggtaggacagcacaaatcctttgttaacatgacttggtccttaactcttaatatccctatttcttccctgagggagagtttggctgggaaggacgcaagtatcattatttttcttctgctggccaaagttgtctctttgtgcattctcagctttcaaaagaaattgagctgaatccacttttaaactctaagggattcgttatcagaaaagaaaaaaaaaaagagagagagagatttgagttggctttgaaggaagtggagactaggaggtccaaggttgaactccttgctcttaaaagcaaaaactagagtgagtcttaggattgcagtgggctctgtgcaccagtatccatagcccttggagaggaatgcccacagtcttttgttgagatgatcacctatctcttcagaatctccaatctagaatttcccatttcactttttagtaagaatataaagttggatactgggtattcagattcctgtttctgctctctctgtaccctgaggcctccaaatacgtataaagaaagaggcaatgtggcagtataacagctaagataggagtggtaacatgcctgtgggatcctcagaacagccaccactgggaaattcaaatgatcataggcaatttctaaggaggtcaaggttgcaggcttaagtcttacatgaatcatttagctctagtacattcaccagccataagctatacacataatgatgatcattgctaccaagaatttatttatttctcatttttgatctgtcatgtacaatatgatctaaatgtaatagaccatttgattcaatattaaatgcctattaaagagatggtcagtttttaagttttaataactaatttgaagcttcttcatcaatcttctctcaattgccttttatattttaaatgatcgtttttgaaaggctttgtcattgaatatattgtaacgtgtgaaaaaaaaagtgtttatactaaatgtgacttatcctcaaaggtccacagaaaagaacatctgtcattgttaaagatcatgcagcctttttcctctgcctggggaaaagttcaaagttgacagtgagttcacttgaagagatgtaatatgaagtcagagcgaaggtaagttgacaggaccaggacaagcaagataaggtttaccaaggagtcttggcccctttcatctgttccatgatctcacctgaaacaaaatccttgttctgctttatcttcctatgtatccaggagatttaagtagtaactgaagctgtctgtagagtaagtacagtagacataacaccacacctcgttttccttttcatgccggggaagccatgttcccgtgttgagactacctttagtggggactttctattcctttccagaacaccatttacaagggaagagggagcagaattattcctctttacagtgcttggaggagattcagaaggtgatcttgttcggactataccttccttaagtattatttccctgaagaaatgctgcagagtctattctgtggcattcttggaccacaggattggaagcacttgattgggaataagacagcacatttctaagatctctttactatattttggcttttttactcactataaaacatttacctagagggctttctattaaatttagtccagcccattctctgacaggtaagtccaggcatcaaaaagtgtgtattttctaaatattgaagtaccattcagcctgtgaaaaataaagcaaatttgtactgatgtggaaagatgttccagtgcatattaagcaccaagaaatgaattagatttgaaagcattcataatattatccttttttaaaagtgggagttggtagatggatgagcagacacattagggcgacttgctgcagcctctggggataagcagtgtatgcagaaactttgatagtcaatttctttattaagaaggactgtggcccggtgcggtggctcacacctgtaattccagcactttgggaggccaaggcgggcggattgcttgagtccaagagttcaagagcagcctgggcaacatgttgaaaccacatctctactaaaaatataaaatattagccaggtgtgatggtgtgcacctgtattcccagctactccggaggctaaggtgggaggatcatcagagcttaggaggttgagggtgcagtgagccgagatgtagcctccagcctggggcaaccaaagtgagatcacatctcaaaaaaaaaaaaaaaaaaaagacttttaggaaagagaacattctgattatttacttttaagtagtttgacttaaaaaccatattaacagggtttatttgaaccctggaagatagtggaccatttttattttcttctttgtactttttgtatttaaaaaaaaattcctcaaactagtggtggtgtttttttttttttttttttttttgagacagactcttgctctgtcccccaggctggagtgcggtggtgcgatctcggcttactgcaatctccgcttcctgggttgaagcaattcccctgcctcagccccctgagtagctaggattacaggcactcaccacgatgcccggctaatttttgtatttttaatagagacggggtttcaccatgttggtcaggctggtctcgaactcctgacctcaggtgatctgcctgcctcggcctcccaaagttctgggattacaggcatgagccaccacgcctggtccccgtgttatttttaaaaggtatccttgctgtaatttttctttatattaaggattctattttagacttttatatatactattctaattcatccattaaaaatttaggcctatatcgaaacctgtaaatctcttaaataattattcaaccagaaaaaaaagttaaatgcaattaaactttgccatatgtgtatgatatgcctaaactaaatggtaataaaaccatccctggttttcattagttagatatgtgtactctcagggataaaagaaagaaataagatcattttgcagcctttctttgaatccagggcagccatccaagaggccaaaaacgtaacgcctggaaaaaataaattccttttaatcttgtggattaatcaggtagtgcaaattttttttttttttttttttttttttttttttgagatggagtttcactgttgttgcccaggctggagtgcaatggcaggatctcagctcactgcaacctccgcctcccaggttcatgcgattctcctgcctcagcttcctgagtagctgagattacaggaagtagccaccatgcctggctaatttttgtatttttagtagaagcgaggtttcactatgttagccaggttgttctcgaactcctgacctcaggtgatcctcctgagttggcctcccaaagtgctgggattacaggtgtgagccactgcacccggccaggtcctgcaaattctgatgcaaacttataaaccacccaccttgatttacattaggaatataactgtatttaccttcccaacattacataaatactatgatgagaaatcaaaattaaagtgctcaaaattgaaagaaaaaatgtagttttgaaataggaaaaccatataaaaatgaaatttagattgcattttctattagaaaaatgtaaatatgtaaatgattacttaggatgctaaaatatgcttttattcacttatatgcaaacaaacctaaacaacatatctaatatgtaaataataaaaccaaaattatcttctttatttcaattggcaacttttttctccttaagtgcatattttatataaacacttcttatttgtttagaaataaaaactgcatgtaaaattcttttattcatttttatagactgcaaatatgccatagccttctgtgagctcgataaatatcaggtgataatttggttcatttaaaaaaaaaacaaatattttacagcttttgtcagattttattgctttaggccaaaggtcaatccaaggcccagggcaaagtataggtagtgtgttttttgagtaggtatacattggaaggagttgctgaaaaggattatatgtcatatttcagaggtacttccataaaagggatgataaccaagctggcctgatgagccacaattgaagttgttccgttttataaaagagtacaccatttcccacagtaggactcctcaaatgaccttcaccaaggcagaggcatattgtgctgaggcttttcagggattaattaaggggctgtgaatagtgtaggctagacataattgtatgtgttttgtgtgcttgtaaagttacctgttatgcatccccttaccttgctcatataattaaaagtagactccaaagaccaaaatttaaagcagcccctgttcactaatcgccccatggacttttgcagagatagttccgttttgggaatgaatttgtaagtggagtttagaccacaaacactcaaaataatgctttcatctgctccactggttgaagttgcccccagcggtgttgcttctcctctgtacatttcctcaattgactttcaggttacctctctgtgcgagctctgggggtgccagagaaaggcagagaaaaagagagacctaagtgcttgaggcagaacatcgacagctaccagtacgtgttctcagctgcaggtttactcagctgttccaaaggacagagaggcagggcagccgcagggtctgctctagactattctttccctttgagaaaatgccctctgaaatttcacgtggctatatgcaatatctatatttggtctagagtattataaaaacgaactagtcctacattgtacaaaaaagctaatttaataattgagagtaatttttgtttaaatatactatgttgaatcatgcatctagacatttgagcttaagttttgagactcagtatgtactgcaagactgaagaaatgtatcacatctgtgctccaacgatccctgtgtctgcagagtgcttcgtggtttaggaagtgctttcacaagcacatttttggatacttacaaaagatgtgaggtttacagaggcgttattgagatttttcagttgagaacactaacacccaggatggaatagtgggataaaaacacagctatcagtgtcaagagacatggatactgcccctggttttacccatggccttttctggatatatatatttttttctctgggcctaattttcttcatgtggaacatgagaaaatggacaaaatagctataaaattttgagcatcctgaagtgatgaccttagacatgaatcaaagactcttgaatctcattatttccatgatcccctcaagttccacgggaccctcattaccacttgtaaattcagtatctactataatgaagaaattcgtatatgtaactgtaaatcaaaactggtataataaagcctttcaaaaagcatataaacaatgtataaatatgaatacactcctattttgttaatatatacatgcatttatattatatataattatattttttacttggtaaacatttcaaattagaatattctctaattttgaaatgttaataataatccatttattgattattgttgatgttgatatcattgaaaattttacaaaatctttttatattcccaataaagaatcctatctttctcaacattatgaacatttatcttacagttacataatgtttagaattaatgtatttatctcaaaacacttgagggtttttttaatgaaagatgcattatataacttgcctcatatcatgtatcatgcatttggtatttaacttagcgaactgtttgttatcatggaatggcggccactgtttctctttttatgcaatccattagaacattggattagcactaaattattctgtattaattgtgaatataagactgttagattagttctgaattgttctgtgttacttgtggatacacacacatattttaatacagaacatatatttcttctgaatccatttctctctcctacttgaccgtagtaaacatactctgcactccagtgtcagtgccaggttatttttgttctctaagattttaattgcattcattattttgggctcagtactggttaggaatagtcttcaaagattaaagctgtttatgtggatatgaaaaatcatttggtgatctgccgaaaccctcctgttcataagaggaagcttttctgtcaaaagaaagaatcagacacataaaacagattttctcaattgatatcacagctctatagagtcattaggctaaagcacctgcaccttgaaatgctttgattgcccagtgtgctgtgaggacctgggctgtcaccttgaatgctgatattcccttcctctgagttaaagtaacatcctagatttatcaccatattggaaattcatttaccaagttgattcagtttgttttccccactcagtgttgtcctagtcagcagatgggccccttatttattagaatggtgcggtcactgaattgtatccaccaagctctgctacttttgcagtggaaatgttagcagttttatttaccaatgcaaatatttaccgagaagctaccaaataaaagttattttggattttttttaaatgtctaattgtttatgcaatcatctactcaagaaacatttactgagcacctatttttacatgattctatcttgtttgtggcaaggaatacaaaggtaaataagaggaaacagcctggtctaatggagatgagggcactggagtactaaagacatgggttacaatttttccttagtcatttattaaccatctggcattatcttctactctgtcttccctgtacttgtgtgtgtgtgtgtgtaaagtgggaagaatatatctttatcaggttatagtgtgaattagaaattaaacatatatagtattcaataaaagcatagtggcagaataaacagttcttctcagcatcatggtagtatcaataagacccggactgtgtcctcaaaggagtgtacattttgttggtgtaatttatgagatgcctaacataaaaactctccaacttattcattacatagactgatacttcattttatctccccccaccatgccccccgccagcatattttctggctcatttgtccctttagttctcttctgtgtcatccagagtccagtcaggaaacaggaatcttagcagttatttcaattgaaaaaggttaacatagggaatcgattataccggggttggaaagctacaaagccaaaaagagacctgtgagccaacagcaatcctaaggatgggggaacaaattaaaagacattcgcgttatcagattccaaaagctcgaagaaaagacccccaaaacttaggctgagacctccacccagctggggctgataactcacaggctgcaggagggtcccagtacagccatccttctcaagctgctatctctaaggtacaatgagaattgcaccgacagtgccaaaaacagtagaagatagaagatgaggctgactgctgctgctggagggaagagctatggccggggcttctctgacagtaatgatgggtgaaaaaggaaggagtaggtcttctcctgcctgccagtttcataccagtgtcctatggcagaatctaacagggagccagctgtgaagaggaggtgtagcttcatggtcccaggtgcagcatcacagagccaggaatagaaagggattggggcttacttactaactagcacaggtctgttttagcagggtgactttatgtccagatttgcaggattacaatttaccctcaaagactggagaactcactggctcctttcatttcgtctactatgatatgttcacttttgaagagaccccaatccacatgaatgttgaaagtaaacatttgtagttatatactcaaattatcttttgaaaagaatggatctgacttttcctacttactatgtcaccattgaagactaccttctcaaaagacttctgttgttactttaaaattcttaaaagacaaatcttcatgtaattctgttggtatcaacaagggaaacacctaatgtgggaaattaacttgtcattcttctccagttaaaatggttagaaatatgaccattaccattaggaaattgtatatgaggttaaacatttattaaatgcaaacacttttccaataaatttaaaataagagatatttctcgttttttttctggtttcaactgaaatagaagatgacatagcctctgtaagaagatgtagaagatgaattttggtatttacaagtttgcatgttgttgaataaaggtttatattaggtttcataattaattctaatattcaaatatctgtttgtagagcattttaattagtttaacaaatgtttactggggtcttataagtgccaggcactgaggaatcaaagttaacaagaccgccaaggtctcagcatgcagggagcacatattctagtggagacaagtagaaaaacagcaattaaacacagaaacaatgtaaaagtgcacaaagggaaaaaaactgagttattttggggagtgtgtttgtataagtagccatgaaagtcttcttgaacagatgctatttaagatgagaactgaaggctgaaaaggaaggaggaggaggtacctatgtgaaatacagaggaaataggaaagacaccattccttaagcagaatacaacttggcattttcaagataccgccatagaagctactggagccaatgcacagggagaggagagagaatgagtttgaagggattggaggggccagaccgtgaaggaccttgtagggcccagtaaacagttgggattttattccaaccaaaatgggaaaccatggaatgttttaaatctgggagtcatgaaagctgatttatagttttaaaagtcactctgttgactgcagagaatggattttagaggttagaatagaaacagagagagtatgaggagaagaaagccaggatctagggaagagataaagatggtggtttgagatacacttcagaagtgaatcttgaaggactagcgagtaacttggacatgagcatgggtaggaaaatgggagtggggaaaggatttacgaatgcttcctatggattagaataagcaactgggtagatgttgatgtcattatgaatctggtagaaacaaagagaggaatagatacctgaaagagtggaagaaaagtgaatcttattttagacacataggatgtttgagacatctgtgaaatattcaagtgcaaatattaaatagacagttgaatatccaagtttggaaattacagcaggaggcaaggccagtgataggaattagtaagttatttatttttgttttcgtttttttaaaaatcatcaaccatgtatctggatatgttcacttgcagagagaatctgcatagtaaagagaacatccagcattgtaaagactggaatagtaggagtgacaaataaattcagcagagaggtcagaaggaaagcaggagtcaagtcctgtgaaaaccaggagagacgattggtgcatgaataaaggagccaagtgtatcttgtgggagccaatcgaacttgcagagaagtccaagtagatcaagagacagaagtgtccattagatttggccacatggagatttccattgaccttgacatgaacagttccacattatatgaagttttatgagcctatatatattcagtttttatgagcctcaggtggttgataggaaggaataataatcacgacaacttttgtcaagtctgaggaagaactgtctgctgacttatcacattttcaattaggggataatatttgatgtaagtggctctgaaaggttttctgtctcctctctgattggaatccataacttgaaattgatccagtgtggtaacaagaatgctattctcctgtttgatctcttaggctttttcactgtagggcattcgctgaaaatgatgaccaagaattgtttaagtgcaaccaggctgggaaagccagtagtaaccaccgtaggacagacaagaggtacttcatctgaataaccataagaatgatagagcaatgtttttttcactcaatgtcaatttaaattacttgaactaaaaagtgaaatatagtttacttattcgaggatactctatagcagacaatctaatgtctgtggatgttattgaattacttccttatcggagggcaagctgaatttgtctgcagttattttcgtttataagagtacagcatttattttttcttaactgtgctcgactttttgttttgatggcaaaaagcattacttggaatgctgaattttaagtatagaattgtgcccttcatattctcacatacataactttgctttaccacatagagacctgatatgtatacatagctttaatatatatcttgtgtattcagctttaccaaatttgtgaacttttcttattttaaatctggttttaaaatttttgaaggggcattctagtgttgctttctcccaacaaaccccagactgatgccttaaaaatttgtctcaagttacatatagaccacactttctcaacattttctcttagatatctcagatctaagatgtctggaacaagctcacactctttcttccataagccccctcctcttccattgtttcttatcacaatgtatagtatcaatgaggaggtgaagccaaaaatctcgattttatactctcccttgctaccataagcaattcattatcacagtctgtccgtgttactctcgcatctccttctctgtattcattgacttgacccctgctgagcccaaactaccatcactattcacctagactgttgcgatatccttctaaatggtctctatgtatttctttcaacccatttcctagaccgcagtcagaatgccgttttcaaaatccaaatcaagcatatcattcctccacttagtactcttcaatgaccggccattgcctttgggatcatgaccaaaattcttaacccagtctaccaagcttgcatgatctggctcctgcagttctctcctggctcaccttgtagcactctgtccccactctctctctccattactctgctccagacatactggccttcctttctggactatgccaagccccttcaccctcagcgcctttgtgcctgctgtcccatctgctaaggatgctcttcctctccgttctttctcacctagttaatgcttatttctacttttgactcctactcaaatgacatttcctcatgaagtcttccccaagccccgggttcagccctatccctttgtagcactggctgctttctttcacagcacatatagctgtagatttttattcctgcactgggatatgggctatgaaggatattttattaacatttgtttctaattgtacactaccaattccatggggacctggatgatgcctgctttacttgacctttgtattcccagtgcgtattgccagtagcgtaagagtgttcactaagcatttattgctggatgaatgaatgaatgaatgaatggtgtcgagaggactgcggagaaacataaggctgactctgcatcttattaccaagactggaaaaaacaatttaaagttcatatcctactgtgttaatagaactttctgtgtatgcaaaggtcagtacattttaagattaaagttgattttctatgaacttactatatatagattgaggtgtaattaataatgtcaggctatggggctctatggacaagtaattattttcagatatgttctacagcatttattattgttaccatcgataactgtaatagctagcattagtagcttgcaaaacccactcataaacctgatttcatttactttaaatggatttagtgtaaaattcaattggaaacagtgcttaagatatagatttgaggtaaatttaactttactataaatatactgaacaaaagtctaatttttttccctgtgtttttaaagtttcaatttttctataatttctcaacatggatttgtcttgataattttgcagcacaggtctggtttgggaagatcattgcttttctatttgtagctgaagtctctgccagaaaaaagtattcatcatgtgtgtaacatggtatgattggcagttatataattgatcagagagagactttttttgtctcatcactggatttcataagttgatggaaccttaatggttgtgtagctgctacccatatttcattagtgcatactacattatggacacacagtaaatattaactgtgttaattcaaatgtaatttataatttaggaagtaaattgatttctgtgtctttctgacaaatcctttcatttctttgaagtattgtttattttagtttgatgtataaatacagccacataaacaagaaaaggtaactctgtcaccttatgttttaataactttgaaataatgagacatttataagtatgctgagattttcctccaagttaatttttcattgtgatttgttttaaatctttctactaaaaactatcatattcagattttgtatgatgcaagaatgtgataatataaatcgggacagatttttctggagtaaaattcaactgtatatattgaaatatataacagttgtatacagtgaatatatattgaaatgtaacagttaatttaacattatttatgatatcttttaacattcttcctaacatacatttcctcttttagaaatttacctaaagtaaatcgttagagaaggggcccttgtagaattataaaaaaagttatgaaatacaataacttaatactattttatcctataaagatttcttatttgtataaatatacttctgatgagattttgattttgaagaaattaagtcatttttccctttgtatcccaaatcaacttgatgaagcccttacttattaacattttaatttgagaaatcccagcacaatcttactattaaaataataagagatagtaattttgattgtcattgtgacctttttaaacaggagctaaagcacaccaattggatagtttatgcaaattgtaatgttttcttttaagaaagtgcttaaaattatgtttcaaaggtttttatactcactttaatcttagcatagatgatgttgagttctgcattaacgaggaaagtatcaccttaattatgtaatagggtaacataacatcattagataaaggcaaaaataggcatggcattgccgctaatgtgtttaagtttaaaataataatttagatgtctttgtgtgtttccttagaagttgctctgaggagatagtatgctctgcttcttggccagcttctggggaggactggctctcacattaagtatattaggtaacagtacaaagcaccaggacacatctatataattgcagagaccttacttgctgggttggaatctcacttggggccctgtttgttgatatatttgcaacaaaaagccattaacttacagggtcaagggttaatggaagaaatattcttgtcttcctattatcttgcaacgttttgctgggagctgaagaaagataacgcttttctctcccagtttctcctggcagttttaaaaatggtgacttcttgtttctgtgactaaataaaagattagatgccaatatggaaagctttagaattgtactcagtcaagctgacagttcagacaagtgttccatcacgaccacctttgctgaggtcactggatggtcccagtcacagaaactaggaggaaggcacctaaataatttcttgatttctatgacttcagttttttttttttcctgctccattttaggtaagttagtcatcttgcacaagaaggcgagaaaatttcataaaactttaaaggagagaacaaaaactactgctaagtccaaaaggaattctatgtctaaaagagagaatttagctaatcagattggtgcccctcaaattccaattattttagagtgtataaagagagtgaaataaatccttgtcccaaagaaattcttattcattaaaactatgttgatgattttaaatggaattatggattaaattagtttgcccagattttatgggtgaaaatcattgcctaccaaaggttatttctgtcatttttaaaaatacattacatagactaactgtttcattataacgtatctgatgagagtaggttgcccaatgcaatttaagagtcagtggaaggtcttttcttatatgtaagcgttccactgggaaattttttccggaaattccaccaattaggggattctccaggttaattaaaataagtcctttcaggttataataaaaatatcgctgagtactttagggaacttgtgaactcctttctgtttgaaggccggaatacctttataatttcatccggaggttagtcgtagccatgggtatagttaccactccagaattgtcttgaattgaaaaaatctcagcctatttaattgtagtgctctgccaacaaacacaggttgtgctggtttgatttgacacagcttggatggtgggtttgactaattttcctaattaaatctgccacaacagtcaatgcatgtggacacatatggttacagtcctccatttcacccataatttagcttgacaacacacatgtgagttttctctttactcaatgtttatacaaagggactttttagcacataattttctaattttcctgaaattctaacttcaaaataatacaagggagaaaatggaatcacaagtctgcttaatttaaaatgaagctggtggaaaacttttccctaattgggatatttgttttcttcccaaattagttgagatcatgctttatagcaggttagccagcatggctgataggctgataagccgtttcccctgcgcccctcagcagtgacagcgtgcttctctacagaaaagctactctgtgtctttgcaaaatgacccaagcctcagtcccttaagtccgtggaccataatcattagaccaatttgtccacttagcatctcatgtagtcaaagggcagattttgtatattcatttgtgcagactttgtatattcatacacctgttaaagatttcagcgttaatgtttttccccagagatttttttaagaccttcttctgtaatctgtttattttacatattctcacaccaggagttttttatacagtaatagctacaatggcaatatatattgaccttctgctaaggcatgtttctaaaatatctctcatcagaaaaaccaagcatatttggagtttccagggagagttttatgtatgctcaccagtaacctagtcaactgtgcagactgctgctatatggtggttactgttttggcttcatctgtggtgctagggtgactgaacttgatgatctctaatagccattccaactggacacctctactgttctatgaaaaaggaaagtgaaaggcaaaagcagaaatgcaggcaattgattaacaccgagcatcactgtactttcctttcacggcttccagtcctatttttctgattgttttcgttttgactttccaaaagatgaaattgtagaaacctctctcttaagtttcatccagaaaaggtacagggggtcaatatcagtgactttgaggacttcaacataattaattctagaaacatcaggaacatagcagaatttaattatatatgtctttatcaaattacagaacttgagtgtggctggcaagggcatctcggcccatcatcaaatgtgatgtcgcatgtgctgaactgagtggtgtgcctgcagaagaagcctgagacagcatgcctgagtttctttttaatgcatgatcatatgagcacctgctctactgtgcaaactgtttctaaccatagaaggcaggaatctagttcactagtgggagaattctgaggtaaaaattggagtgaagaaacttggatatggttttcacatgcttctgaacatctttacattaattgagtttttcttttatggctaaacgcttttattaaaggaagacttaaagatctagaatgacttgtcattgttaaattttcccttctgctatatagtttcagaaggaagttcagaagcattaaaactgtccctcttcttagcacacactgttgatacatgtgcttacacattcagtcacacatacgcaattatttcttttaatttagacatatctagtgtacatgctgagtgtgcctataagtgttaattataacaatatttttgaaataaaaatatataatatgcataccttctatgaagtaaataatgatgaggcaaaataataattgttccatctgatatcttcgtaaatttgtattacaaatgattatctctcgtgtgtctctgtctttggatctcatttctttgtatttctcttaacaagcacacacatacacacatacacacacacacacacacacacacacatccttggtgatttcaaaagaaataattggttttacagtttgtatctgcaaaagatttttttttcagttagaatatctcatttttaatgatagtattagagatatgcctaccattggcattctactatgattcaattttttattagtcatctttcacccgttgcttaacgtcaatggctctttcattcttagaccctgagttgaaatgaatttttacatatactcaatatggtttggggcccaccagttcccactacagtggtgctccccatcactcacatacaattttatttaagacaaaacagcagctccagcagaaaataagtgtaatcttctcctttgtaagttgtaattgaggttatggcacagcatattgcctgtggcagaatctattaccaagaagtggagaccatgatttgaagctggctgcagtgtaagcaaaatgaattaattatcagcagtacagaattgaagggaaatacagggtttcctaaagtgaaatatattggcatttttaaatagagaacactcactgcaaggaacttattgatgaatcaccaagtcttttctacttttcttgcctttcagaatttgtatatactcaggttaagatgactatgtgtaaattaaatcacactttgctcagaatgcatagaaatattttatagtatattttgttctttttcttagttgttgaaatggagtctcactctgttgcccaggctggagttcaatggtgcaatctcggctcactgcaacctctgcctcctgggttcaagtgattctccagcctcagcctcccgagtagctgggattacaggtgtgcaccaccacacctggctaatttttatatttttagtagagacggggtttcactacattgaccaggctggtctggaacccctgacctcaggcgattcacccaccttggcctcccaaagtgctgggattacaggcgtgagccacggcacctggcctgttctttattaatttaaagtttgcctatttttaacatataactgttactgtcacttggacaggtaaatgggcaaataatgaatggactaaattagcttcagtattattctttaatagaaaaataactctctccttatcaagtgtggctcaaagaaggcaaaatggaacgttttttgagagtttataaacatttataattttacgtcataagttgtgaactttagtgaccataacttttgttggtaattatttagcaaaattgagtatcttcatagcagcaagataattagcttatttgtatttctttatgtgtggttttccatttaatttaaatttcattcagttgactaacaatgatttttcacttttaaatatcaccattcaaaaaccaaatacaattacattttgccaaatttatttttaatttttttttctaggaataggtcgttatttggctgtttttatttttctgtttttagataattgtttcatataattgtaatgaaactgtttgcttttaagcttcatttagattcttttgtgaaaggatgctctgtctctactgggtattttctagcagttgtgcacattgacttttctttaagttgtagaggatctgagcagatggttttctcagcatctagacaaatagcatacatggttcaaggtcactccatgcaacctgcctatgataaattgggaatccagaatttgtctcatttacaaatgtccaacaacataggtccatggaaaacagtgaagtgccaaagaaaaagatcagcctcctgggaaggaggagacccatggaaaatccccctagtttcagaggctttcatgtgagagggctgtactgacctgtggtggggtcttctgatagtgcttctcccttctacctgccgttcagatgctctgaactgatgacctccatggaaactacaattaccaggaaagcctcctgttgccgtggtcactagtgactgtgcccatgctaatctttcccaatttcctttccagttgttttctagggatttctgtctttgatagaatgtaagagaagagatgaagaggtgtccaggtgtgtgtgtgtgtgtgcttttgtgtgtgtgtgtgtgagagagagagagagagagacagagagagagaaatgttgatgatgggtagtgaggtaaattctggtgcctcaacaatgagtttctacacagaaaaccacagttattaagttgatgtctgtggagctctatgaagtctttatgtgagcttcagtgggtccgtggatcctctaatattttgtgtgcatgcatatatgcctttttaggggagagagttcattgcttctaccagattctcaaagggaaatatgaaatttctcccaagaaaatcctacctcctgtggtataatggttgcccaaaatgttggttgctggatgctttctacttccttaaggaaaagttaagacgttttgtacctactttcaggcagtcctggcatgtatgggccatggattgaacattagaattcagtttaattgatcttacatttagagaaatttttccctagcctctggcaatgatttggctgttatcctttttacttattttcttttttacctctatttttccccagttttgtatttaggaccaggagaagacagttctatgagtaaccagctagacaccatattaaaagtagtctgttcatattaaatattgatcacatgaatgattgtaataatcatacatgcttaaagctgtatgtgcattaaccaaacctgtgtaaaaatttagcgaagctctgaaaggttaaagaatttgccaaaaaagacacagctggggagtaacagagccagggttcaaatctaggtctctgattttaaactccatgttctcaacactatgctattatgccagccatagtgggtgaacaaagcccaccagttttcacactctatccatacgtctaacaagactcatcttccgaacatttttttttcctctcctggcttttaagagcaatggcttagctagaaaaaagtgaaccctagcaagtgtttgctacccagttcacaaaggtaagaatttcaggttgtctgttaggtttaggttttcatagatagtcagatcctgaccactttctcttgtgtgacctcagacacataatctggcatctctttgcttctgttcctttgtgtctaaagtggggtcattgtgaagattcgatgagtttatacagataaagcattaaaaatagtgcctggtacatagtaagcactcactaaaagatagctgtcattattagttataacttagttggaaggtcttatttcctgagggcatctggtacgtctttggataaatgtggccatgaaaatgacagtgactcgaagagggccgaataggatcagctcagatctggagctcccagtgagaccaatgtagaaggcaggtgatttctgcatttccaactgaggtacccggttgatctcactgggactggttagacagtgggtgcagcccatggagggcgaccagaagcagggtggggcgttgcctcactgaagaagcacaaggggttggggaactctctcctctagccaagggaagtcttgagggacggtgctatccagcccagatactatgcttttcccatagtcttcacaacccacagaccaggagattacctcaggtgcctataccaccagggccctgggtttcaagccctaaactgggcggctgtttgggcacacatcaagctagctgcaggaattttctttttgtaccccactggcacctggaatgccagtgagactgaaccattcactcccctggaaagggggctgaagccagggagccaagtggtcttgctcagtggatcccacccccacggagaccagcaagctaatatccactggcttgaaattcttgctgccagcacaatagtctgaagttgacctgggatgctcgagcttggtgggggaggggcatccatcattactgaggcttgagtaggcggttttccccttcacactgtaaacaaagctgctgggaagttcgaactgggcagggcccaccgcagcactgcatagctgctgtagccagactgcctctctagatttctcctctctgggcagggcatctctgaaataaaggcagcagccccagccaggggcttatagataaaactctcatctccctgggacagagcacctgggagaaggagtggctgtaggcacagctttagcagacttaaacgttccttcctgcctgctctgaagagagtagcagatctcccagcacagtgctggagctctgccaagggacagactgcctcctcaagtgtgtccctgtcccctgtgcctcccaacggggagacacctcccagcaggggttgacagacacctcacacaggagagctctggctggcgtctagcaggtgcccctctgggacaaagcttccagaggaaggagcaggcagcaatctttactgttctgcagcctctgctggtaatatccaggcaaagaaggcctggagtctaacccaaaaaactccagaagacctacagaagaggggcctgactgttagaaggaaactaacaaacagaaagcaatatcatcaacatcaacaaaaaggatgaccatgcaaaaactccatccaaaggtcaccaacagcaaaggccaaaggtagataaacccacgaagatgaggaaaaacgagtgccaaaaggtgaaaattccaaaaaccacaatgcctcttctcctccaaaggatcagaactccttgccaataagggaacaaagctggatggaaaatgaatttgacaaattgacagaagtaggcttcagaaggtgagtaataacaaattcctctgagctaaaggagcatgtcctaacccaatggaaggaagctaagaaccttgataaaaggttagaggaacggctaagtagaataaccagtgtagagaagaacataaatgacctgatggagatgaaaaacacagcacaagaactttgtgaagcatacacaagtatcaatagctgaatcaataaagcagaagaaaggatatcagagattgaagatcaacttaatgaaataaagtgtgaagacaagattagagaaaaaaacaatgagaaaaaatgaacaaatcctctaagaaatatggaactatctgaaaagaccaaacctacgattgattggtgtacctgaaagtgatggggagaatggaaccaagttggaaaacacacttcaggatattatccaggagaacttccccaaccgagcaagacaggccaacattcaaattcaggaaatacagagaacattgcaaagatactcctcaagaagagtaacataattgtcagattcaccaaggttgaaatgaaggaaaaaatgttaagggcagccagagagaaaggtcgggttacccacaaagggaagcccatcagactaacagtggatctctcagcagaaactctacaatacagaagagagtgggggttgatattcaaaatttttaaagaaaataattttcaacccagaattttatatccagccaaactaagcttcataagtgaagaagaaataaaatcctttacagacaagcacatgctgagggattttgtcaccaccagacctgccttacaagagctcctgaaggaagcactaaatatggaaaggaaaaaccagtaccagccactgcaaaaacaacccaaaatgtaaagactattgacactatgaagaaactgcataaactaatgggcaaaataaccagctagcatgataatgacaggatcaaattcacacataacaatattaatcttaaatgtaaacaggctaaatgccccaattaaaagatataaactagcaaattggataaagagtcaagacccatcattgtgctatattcaggagacccatctcatgtgcaaagacacacataggctcaaaataaagggatggagcaagatttaccaagaaaatggaaagaaaaaaaaaaaagcaggggttgtaatcccagtttctgataaaagagactttaaaccagcaaagatcaaaaaagacaaagaagggcattacataatggtaaagggatcaatgcaacaagaagagctaactatcctaaatatatatgcacccaatacaggagcacccagattcataaagcaagttcttagagacctacaaagagacttagactcctacacaataatagtgggagactttaacaccccactgtcaatattagatcaacgagacagaaaattaacaaggatattcaggacttgaactcagctctggaccaagtggacctaatagacatctacagaattctccaccccaaatcaacagaatatacattcttctcagtaccacatagcacttattctaaaatcaaccgcataattggaagtaaaacactcctcagcaaaggcaaaagaacagaaattataacaaacagtttctcagaccacagtgcaatcaaattagaattcaggattaagaaactcactcaaaaccacacaattacatggaaactgaacaatctgcttctgaatgactactgggtaaataacgaaattaaggcagaaataaataagttctttgaaaccaatgagaacaaagatacagcataccagaatctctgggacacagctaaaacagtgtttagagggaaatttatagcactaaatgcccacaagagaaagcaggaaacacctaaaattgacaccctaacatcacaattaaaagaactagagaagcaagagcaaacaaattcaaaagctagcagaagacaagaaataaccaagatcagagcagaaatgaaggagaaagagacacaaaaaaactcttcaaaaaaatcaatgaatccaggagctcatttttttgaaaagattaacaaaatagactgctagccagactaaaaaagaagaaaagagagaagaatcaaatagacacaatgaaaaacaataaaggggatatcaccagtgatcccacagaaatacgaactaccattagagaatagtataaacacctctatgcaaataaactagaaaatctagaagaaatggataaattcctggacacatacactgcccccgcaagattaaaccaggaagaatttgaatccctgaatagaccaatatgaagttctgaaattgaggcaataattaatagcctaccaaccaaaaaaaggcccaggaccagacagattcacagctgaattctaccagaggtacaaagaggagccggtaccattccttctgaaactattccaaacaatagaaaaagaaagtctcctccctaagtcattgtataaggccagcatcatcctgataccaaaacctggcagagacacaacaacgacaaaataatttcaggccaatatccctgatgaactttgatgcgaaaatcctcaataaaatactggcaaaccaaatccaacagcatatcaaaaaacttatccaccatgatcaagtcggcttcatccctgggatgcaaggctggttcaacatatgaaaatcaataaacgtaatccatcacataaacagaaccattgacaaaaaccacatgattatctcaatagatacaggaaaagcctttgataaaattcaacaccccttcatgctaaaaactctcaataaactagatattgatggaatgtatctcaaaataataagagctatttatgaaaaacccacagccaatatcatactgaatgaacaaaagctggaagcattcccttcgaaaactggcacaagacaaggatgccctctctcaccactcctattcaacatagtattggaagttctggccagggcagtgagacaagagaaagaaatgaagggtattcaaataggaagagaggaagtcaaattatctctgtttgcagatgacatgattgtatatttagaaaaccccatcgtcagcccaaaaactccttaagctgataaggaacttcagcaaagtctcaggatacaaaatcaacatgaaaaaatcacaggcattcctatacaccaatagtagacaaacagagagccaattcacgagcaaactcccattcacaattgctacgaagagaataaaatacctagaaatacaacttacaagggatgtgaaggacctcttcaaggagaactacaaaccactgctcaaggaaataagagaggacacaaacaaatggaaaaacatttcatgctcatggataggaagaatcaatatcatgaaaatggccatactgcccaaagtaatttatagattcaatgctattcccatgaagctaccattggctttcttcacagaattagaaaaactactttaaatttcatatggaaacaaaaaagagcccatatagccaagtcaatcctaagcaaaaagaacgaagctggtggcatcacattacctgacttcaaagtatactacaaggctaccgtaaccaaaacagcatggtactggtaccaaaacagatatatagaccaatgaaacagaacataggcctcagaaataacaccacacatctacaaccacctgatctttcacaaacctcacaaaaacaagcaatggggaaaggattccctatttaataaatggtgttgggaaaactggctagctgtatgcagaaaactgaaactggaccccttccttacaccttttacaaaatcaactcaagatggattaaagatttaaatgtaaaccataaaaagccctagaggaaaacctaggcaatatcattcaggacataggcatgggcaaagacttcatgactaaagcaccaaaagcaatggcaacaaaagccaaaattgacaaatgggatctaattgaactaaagagcttctgcacagcaaaagaaactattatcagagtgaccaggcaacctacagaataggagaaaagttttgcaatccatccatctgacaaagggctaatatccagagtctacaaggaacttaaacaaatttacaagaaaaaaaacaaccccatcaaaaagtgggcaaaggatatgaatggacacttctcaaaagaagacatttgtgtggccaacgagcatatgaaaaaaagctcatcatcactggtcattagagaaatgcaaatcaaaaccacaatgagataccatcttgcgccagttagaatggcgatcattaaaaagtcaggaaacaacagatgctggagaggacgtggagacataggaacgctttacactgttcgtgggagtgtaagttacttcaaccattgtggaagacagtgtggtgattcctcaaggatctagaaccagaaataccatttgacccagccatcccattactgggtatatacccaaaggattgtaaatcattctactataaagacacatgcacacatatgtttattgcagcactattcacaattgcaaaggcttggaacccacccaaatgttcatcaatgttggactggataaagaaaatgtggtacatatacaccatggaatactatgcagccataaaaaagaatgagttcatgtggggacatgggtgaagctggaacccatcattctcagcaaactaacacaggaagagaaaaccaaacaccacatgttctcactcatgagtgggaattgaacaatggtaacatatgggcacagtgaggggaacatcacacaccagggcctgttgggaggtagggggcaaggggaggaatagcattaggagaaatacctaatgtaggtgacgggatgctaggtgcagcaaaccaccatgggacatgtatacctatgtaacaaacctgcacgttctgcacatgtatcccagaacttaaagtataataataaataaataaatataaaattacagtgattcactaataatcatattctgtgtctgaaattccttttcccctcctttatctttctgcacccctacagagataggaaaaaccaaagtgttttttctccgctcaaacatcactcaacacaacacttctcacaccagatgtatgggggtttctctccacacaccaagtgatcagttctctagcagacaccaagtgggtgtaattcacttcatttctgatgctggctacctggaggaagagtcaaccccacagattaaaagctcagtcccacaagactgcctcccacttcaaatgccagtagcaagccccaggttatgacctgtacttctgatgtgctggctatggatctaggtttccaaaacctccttctcaggttttatgaatttgctggagtggctcacagaacacagggacatgctttgcttacatttacccgtttattgcaaaggatattttaattttaatttttgtttttttttacagagttgatatgatttactaacaagtattaattgtcgatcttgagacttctgaaatattttcattggctttatattttaatatgaaaattaataatttcttttttttaaattttattttattttaagttccaggatacatgtacagggtgtgcaggtttgtttcataggtaaatgtgggccatggtgtttaactgcacctatcaacccatcacctaggtattaagccttacatgcattatctgtttatcctgatgctctcccccttcctctgcccccctcccaccccttcaggccccagtgtatgttgtttccctccctgtgtctatgtgttctcattgttcagctccccacttataagtgagaacatacagtgtttggttttctgtttcctgcattagtttgctgaggataatggcttctagattcatccatgtccctgcaaagggcatgatctcattcctttttatggctgcatagtattccatggtgtatatgtaccacattttctttacaaggatattttaaaggatacaaataaggagccagatggaggaggtgctcagggcaaggcatgtgggaaggggtgtggagtttccatgccctccctgagtgtgccactctccatatacctccatacattcatcaatctggaagctcattcaagcccagtcctttggggtttgtatagaagtttcattatgtaggtatgattgattacattattggccattggtgatccacttaaccttcagccttcctcccctccctcgatgttgtaggttggggctgaaggtgccaaccctctgatcatgtcttgacttttctggtgaccagcccccattctgaagctgtctaggggtttcatatccactgacaagctatctcattaaccagcaaccagctatctcattaacatacaaaatacactcttatcactccagaattccaaggcttttaggagctgtgtgccaggaaactggaagaaaaccaaataggtatttcttagtatacatcacaatatcatatccctgcagccacagcaactttgtagataatctttaaacatcagaatggagaaagtggaagatgagcccggacagagtgcattccaaatcagtgctgtttcgtgtctctctttttcaccgtataatctgaagtttagtctcaagattctgccatctcaccactacccatttctaaatggaaatttttcagctggtcacagccaggagccacatatgaagaggaataagagacagaagacttctaacttttcattgcttggcaacagtaaatgcttacagtttttttaaaaaataaaattgatgttataactttatggaaatcagttgtaaaagggagttagcagatattttatctttgtgataagacattctactggtctgtggatatgtgaatagtagatcgttttttggaagacactaaaaaaattaaagttttgtaataagagatgtaaattaaagtcatcagtagagagaaatgggtgccctaaaatatggaatatttggagttataatgccttctaaaggaggatatattattataaccatcatttattcaataaaaactataggtacttaccatgttccaggtacatggctaatttctggggcaacaaaaatgacaaagttattgtcatccttgcccttgaagtgctggttaaaggtgacagataatcaaagaaataattgcagagcgtggcactgagtatgatgataaaagttaaaaaaaagagtgctgagagaccacagaagaggaagctatcagctcttaagatgcttggaaaaataacagatgaaaggacatgcattgaacatttattgaatgaatgaatgaatgaatgaatgaatgagtgaatggtgtcaccaaagcttatgtcatcacagtgttaaacactatatcctgaaacaatgacctggaattttgcaaacaaaagagaagattcaatgtagtagtcaactccattgcagaacactggggcctcaaggtgagagaggaagctttatgactcctacagtcccctaaaaattgagtaacatattttaatctgttacccaataacatactttaaataatgtaagctgcatgctgttatttcctagaaagatgtggtttcctggagataagttgtgtctaggtgaagcttctgcatgatagcttatttcaactatgtaacaaagtatatattttaaagacagccagtagtgaatctttcggaaagaaaaaagttatcttaaaagtagatgcattttgatttaggattttgcatgtctgctttcataaataggttttcatatctggtttcctgcattaccaaatgacattgaagtttttatagatttaatatttatcataacatacaactacatctattccctggaattatgtgtgggtgtgtgtgtgtgtgcacgcacatgtgcatatttatctgccaacatctgaattccctctatagcattgcaaatgtaaaattagtatgtcattcttagaggtgctgtttagtattacaatctgtagctaaatactaggctaattattctgtgaataagtctctttctctggtataatgtagcactcaagcacaagcgatcaataaatgttattatgttatatattttaatgttattctacaagttagtaaataaaatatctaacatagtaacattttttgttttttatttttatttttaaaatatctaacataataacattgccaactcttttcacacatgagttcatgtaacccttatgatttgccatctacaaccatattttaaagtgccaaatataaagttggtcattgtttctaaaaagtcagtgttctcacgttctatttgactcttcgtgtctaatagtgatatttaaagtaggtcatttagctgctgattttactcctgaataactccggtccccttaacactatcagatgttcctttccatcacgtgtttttctgcttccagttgaagaacccacattaaaaggagttgagtggaaaatggaatgagcaatacgccctcagtttactattccttccagatatttttaaatgaaggtacggaaagataagatggtaggtttgttgcggggcagagggaggatggaaggagagtttatcaaaagcgaaaaaataaacagatgagggatataagaatcattcccacagcctccatctccctttatgttctctgatttccaaacatctgtatttctatttttaactttataatagcaaaaatgttgtttaagaagtaaataattcctaacattttaaggataaattagtgtagtatacccagtataaggcaagggcccagatccatgaaggtatcagcattaaagaagacaaattacagaagaccttcaaaagcctttagaagcttatgtactccttaacagtttacaaattgccttatctccatttttcatctgtataaattgatcacatttcctcaatttctaacatagagcagaaccactttcatattttttatttatatgtgtgtgttatactcatacatataaactgtatttttaaggacacatttaagtgttcccttttttcacctgacactaatgttaagaatggaaaattatgatacaattcagcaaggagaggaattgcggtgcatgttattattgactacattcaggtatagttggacaaattgggtaatggaaccaaattggattatatgagattctggccttaaaactatcattctattatgtcttctgatgaaacacaattgaatttgagttgtgtaaactgaaaaaaaaataaataattgcaaaatgtaaagtgaaagatacaagagtagctacatagaatcgaaataaaactactcacgtaaataaaatatttcttacacacttaaagcacatatattaacattatataagaacacatctaaatgaatgcttatcactgagcaatatgattttcaaaatgttattcgaagacaacttggctgttcataaatcttttaattttaagctgccgatttacagtttttcctttcatcctcttgttttgaaggcttgatgtgggagtgctaattaatgttagaattcttatccaatgtacttgttgctaagcagatagaactatcagagcattttattttgaaactgcactcttttttgactgatatagcatttgaaatcgtgcttgaagaaacatttcatggcagggagccagttttctcattaagaacatattgcccatgaccaattcactggtttatttatttccacaatgcctgttgcccctgtggctcatacatgcgtcgtgttgaaaaccacatgtaaaagacatgaacactaagttgtcttatcagtatgagaatacacaatttataaaatcataaaacatggaagttaatgaaaagtttatttagaactgtatattttgccttccaggcagaagttcttactgactccttgggctgtcttagctgattgcacgttgacttctgtattcttcatatacgttttttgtctcaatttgagtttcttcagaagcagttcctgtgtcagaggtcctgtttgtttggtttattttataagttcataaaatactgatagggatctgagaaatgagaaaggggacagcaactgagagaagccttggaaatggtttaaaaccatgtctcagagttaagggacaacggaggtaggatatttatgcaccaactcttcagtcactggctgagtgtcacaaggtttgaagaagatgtgatgtccctgacacttaccagcctgccatgcaaaaggacagagtagtctttgaagtttcagagaaagcactgagccaatgagaggcgatgacctgtactagcagttggatgccagttggggcacactgaagcagtaacagctaagtgctctaggtgggccaccaaaaacatctgccatatcttctgtgggcttacatccacccaaagtgttatttttattctatcctgatctatggaagatggaaggatcatttcgtagttgtgtattcatttttttcattagtttgtacacatttatggatatcccctgctggggccactgttctaggcatggaggcagacaccagggaagaatatgacacaccaccatcattgaggtccgcacagtcagggtaatgggcagaggcagtgaagagccacggaaaatccttgaggtgcaaatgaagttgaatcatttactccatctatgggaatcatttacttcgtctactatgagtagtacaaaatcctactaccttctggagtggctttggctctttgtctggcattgagtttctttctctgtcttagcccgctggtctctgagtacccccctgaagatgcattcatatagaaaagggaggagtcagtaatatcttgtttttctattcggggtattttagtaactgcatcctgtggctgaaacattcagatgatttcaagattttgacacatgaagattccaggttcacctatgaaagaaaatagggagtctgcctgccaaaattctagttttatctaaaggatgccaactagcatatagcatgcatgcagaagatggccagtattacattttttgaaggagtccattacaaaaactataatatttagggatatgtacttattaatctagaatgagagctacagctatggtaatatgaatggaagcataataatttttccaaatagtattactgtttagagattgtttttgtttctcttccttaggttttttttttttttttttttttttttgagagaggagatagaggtggctgctgtgatggcaatgatagctatggttactgtcttattgaatgcctattattatattaacaaaaccgaagttcagagaggttaattaacttgtctaaaatcacaagcttggctgggcatggtggctcatgcctgcaatcccagcactttgggaggccgaggtgggtggatcacttgaggtcaggagttcgaaaccagcctggccaacatgatgaaaccccatttctactaaaaatacagaaaaattgctgggtgtggtggcaggcatctgtaatcccagctacttgggaagctgaagcagtagaatcacttgaaccagggaggcagaggttgtagtgagccaagatcacacaactgcaccccagcctgggtgacagagcaagactctgcctcaaaaacaacaaaaaacaaaaacaaacaaaaaacccccaaaaaatcacaaactagtcagtcagtattttgacctgagtatcttgaattctcaggtgtggctgcaagacgtattgataagaaaaaaaaaaaaaaaaggtacaacataagagaattcaagtttcattcacttttccagcaaatattctgtagaaaatccactatggcccagccacttagctaggcaatgtgagtaccaccttctaagacagagaaacaaaaccttcccctcatacagcttaccatccggtagggaggttagctaagctattaaacagatcagtacataccgggggatgagtgttgtgatgggaaattcagttgataagagagcccgaagccagaagacctcattgattttagggatcagaaaaggctttctgcaggaagtaaattttaagctgaaagttaaaagaggatgactaagctaaagtgggagtcaggggagcggaaaggagagaagtgttctaggcactgggaaggcccagaggccttattctagcattgaaaggacaatgtggctgggacattgagttcaggagggagagtggagacagaagaagccgaggagatggaagccctgtgaaagatgcagcagatatcatgatgttgttcccaacctaaaagccctgggaagcccatgaaggagattcctctggctctggtgtgtgggcagattgaagaggaatataccaaatgaaaggaagcatcctaagtaattctgatgatcatcccggagtgctgctggtgaaggtggacagagtagatttctttgagagatactgaggacttaggaagagaagacttgggagagtttgcactgaagaagggagaaagcaatagcattgtctgtgcttttgatttgaaggaaagggtaaatgttagtgaaatagcttctgaaggcctttaagaagactgcctacatagaaagcctacttctatctgccggccaaagatctggaggaacctcatcctttcattctaaaaggagtcgtggatgtagatttaaccgttctggtatctgaaggtggtgggattaggaataatttttcttcctttttttttttttttttttgttttctctgctttagttttataattaaaaaggaattttcttataaaaatacagctactgtgatatcttctgctgaacatgtggctcaacttactcacaaggtcaggaaagttgggcccaaggcataactgcttaaactcaagaaaagagaaaagacaatttcatcaccagtgtaattaagtgagcttccctacaatatcttaacttagcttctcatctaagtaatatgaatccaggtatagtgggttttggtgtttattttaatcttgtattgtcattagccagttagttacattagttacccttgggtgtattgtggaaatagatttccgttacattctttttttcccccctttttaaggatttagagtattatgcctgagtgaattgattcatagggattttacttactcattcgttgtgcgctgctgtgtttttgttctccatctggttaagctgccgtgactctctgtatagcatttgcacagtgttcacatgatgcttgggtacttaggtgtcagtttttcattatgcccggatgatgtgcgttgcgtggaaagcctccggaaccgtaaactctcatttcccaatcatgaatagttaggaaaccagagttcggcattttcattaacatagggtcttacatgccagttcagcttactacctgctaagcctcctagtctgttggaaaatgtgcattggcagttttccagtcttgctaagactcataaatagatgcctttcatatgaaatgtatttgctttggcatattgacactggaatacattattcttttagcagttgaacaaattaaaataaaaatgatgacttctttttttcagtatactaaaatgagcataattgggttaatatcttaatctggcagtcaggaattagcttgtatacccacaaccacataatttcactaagggaagtttacatgtttccttttccttgttctgttgatgaccttcctacgtgtcaataactagcagagagtttggtcagataaaggggttggaataacctggagagcttaccaaaaaaaatccttatctctgagtaccatctctgtaaaatcctggtttaattggtcttgggttcagcctgagcacctggatttttttcaaagttcccagatgatttcaatgtgcagtcaaggctgagaacactcgctctcatcatgtgtaccagagacaatactttcgtaagcaaacagcctcacctaattgtttctttctcttttgttttccctaagtctagtccacatctttgggcatggtccttgagtaggagaataagagagctattgaatggtccaagaagattcagatggcttcattttacactccagttgatcatatagaagtttagggagaacactcaagaccactgggagctactatgtaggtgaatagatttgtccaagacccactctggcacttccaagctggccctggtgtactcatgagtaaagcctgccagtgtatacttacatttccaaagacttccgtttagtaagggctgcctgatcttataggtgcctcagactggtccttctacaagtatagttgttttatttcatacttctaaatggatgtttgatattgtttaggattcaaatgtttattcagaaatccataaagtaggtatttgacatctcatagttttgaacaaaatggtaagaacaagatatatcaaaatatatcttgaaggcatgagtaccatagaccttttagaagtgcattttctagcatcttgtacaaaacaagacccttatttctgtaaaacttgatggaccttagctgggaatgtgatatcacttatccttcaatgattttttaaaagaattatacctgcatttaaagccttggcaaaatatggtaacattctagctactgaaaacccataagatattgttccacataagatggataactttccactgaagatggataagttttagggtatctgaaccttttaaaccttgtgggtatcatttgtataatattctacttaatagtaaactctgccattcacagtgtcccctttctcatttttctagctacagttttcggcaagccatttggtgtgcttgcaatgctatcatgagctatggcttggcgttacaaggtctggagagtgaaagtgttttctgagtttctattttcaatagttattaggaaaacaattgaactttggctatttcctggtaggtttaactttcatttaagtgaggcatctgaatatttttgttgaaaatataatctttcaccatgaaactatctgagtttgagatttcagttataaaacacgctcttttcagtcattgaaaaaataacctcctgcaattttcctctgaaaaataaaaatgtgctttgatagagttttcgataattattatcatacatctgtgcatgtacccacaccattgtgttcatctcccatccatgtcattagtgaagatatggattaattccacattggatttcattgtatagaatctgggtatttatatctaaaaaaaagtgctgtcatttgattacatttaggcaaattttctcagtttataatctagaatgtgtgtttcggtcttcttctttaactggatgttctcaaagtatacttaaatggcatggccaaaccattgaagaaatacaacagtgatgactagtttctctgtgtctttccctgttcagcagttatagaggcatgattctatgattatttttgtgtaatctttgaatatgcaaaacaaattataacaaaaagctgtggactcttatgggattctaggtcgtgtatatttaattttcagcagcaaacttctccctatttgtaacttgttgatcttcttcagaaatattttcttttccatttaaaaattttaaactgagactacaatcaaacctttttcttttcttcatgtatagcaatgcttaagttatttgtatttcttataattaattttatctgcaaataacagaaatcctgaaataatagtggcttaaacaaagtagaagttaattttttatcctcatgttaaaacaaaaagtgcagacataaggagtctggagctggcagagtggctcagctgtcatcagggacctgggtttctgtatccttagcacactcaaggttgcctcatggttcaagactgctgctagattaccagccatcgcattaagaaggaagctagaaaagcgaagtgggaaaccaagagagttgtcctcttctttacaaagagtctttctgtggatcccatacatcacttctgcttaggtcttgttggtcagagctaattcacatgaccataccttgctgacgggaaggcttgggatgctagaactgtagttgggtgtaataccatcccaaatcccaaatatatttggtggctttttttgtttgtttgtttgtttgtttgttgttttttcgctaagaagaggaaatagactttgggataggaaatagcagtctttgctacctcactgttttcagattatgatattgtaagatatgctcaaaatactccaagtacaaatacttacattgcttgttgacagagtaaaataaattatataagtaaagctagttaggaacttgccatattggcagttcattttgaggatatttctaaaaatcatggactgcaggaggagaaataccaaagccaaacacataaaaatttcccacaactatatgaaaattccaaaatttatctatatggtaatcatatgtctggtgactttatttattcagaatatctctaagaaagagagagggttgtatatttgaccaattgtttttgtcaattcagagctgttgaacaattataaaattccaaagttctcagaaaatacttggctagtcatggtattgcatactgtagcttctttaaacactctgcagaattcttgggagttggtcatcagtagcagacggtaagaaaggttatgaagtctcctggttgtctgttgctaaaaaatcatcccaaaatatagtggcctgaaacagcaacaattattgatttgctcataattctacagtttggacaagattcagtggggatggcttatctctgccccatgtgccatcagatgggatagctcacctggaggggctgaaggatccacttccatggtggtttaatatacacagctatgaagtcagtgctggctgtctactgggaggtctcaattctcctcacgtgacctctccacatgactaggctgagcttttcacagaatggcagctgatttcaaagagggatcatcttggagaataagcattccaagagtacaagtcccagtgtgcaagtacttatccagttttttgttaatgtctcattagccaaatctagtcccatggcaattgggaggggctacccatggatatataaataccaggaggtgtggttctttggaggccatgaaagaaactttctgccacatttaagttctcaggcagaaaaaatagtgtttattgaggtactaccatgtgccggtcactgtccttaaacacagagctgccctgcataaaaggtcttattcgtcccattttccatttaagataaatgaggttcaaaatgttttaaatgacctgcaggaggttacaaaggtcctgtggtgaggctccatgtttcaatctacctctgaaaaactcctaagtctttgcactttgcagggcctccagctgcctttttaaccacatggtccattgtcactgctgcaggcacgtctgccctgtgtgctttcactctaagcacaataaaagacttaccacccgataagtctgttttttgaattgagaacaagagaaagagattcctgaacattctaattaaccaagtaccgctcctgtgccacagagatgcctagcagtgagagccgtaaaaggaaagtgcttggcagtgaagcaagacaagaaacctggtcctttgtgctctgccccattgcaagctttctcctagcaaacctgaccagtgacaacagtgtccaaagtcttttctagaaaggtctccatattggtacctttttcctgaagtaagggcttataacaagggcattaaaatatgctaatttctaatgctttctattaggcgtatccacatatcaaagcttttactggaacacctttgtcaaaaaaaaatataggtcatgcacatggccatgaaattccattctttatattttaagcagcatcaagattgttcttttccttcgctgtttggcagattagaattcctctttaaagtgggagaagttagttacttatcaaaccatttgattaattagctagacctgtcaggccaaacaggactagccaagtcttttaaatctcttaatatgagccaattttcacaataacttgttttattcatggccttcacattttaaattcttgctcattagtgacctggtatttgggcttgtctgaaaggagagcatccgttgtgttaaacagggctcattatggattataggttttcgaatggggatgcctatgcacaaaagatcgccctcccattttcctctgaatagttaattggaccttcaccttgtttttacaagcaaaggctaagcttcaataaggagataggcttttataatgccacagtttgggttgtactgaagagctggtgacctatcattatcaatacagatgtggaactaaagtacagcatgtgtttggttttgctagagacaataaaagtaatggctgtttttaaaaccagtaaaacactgaacttgatagaaggagaaattcattgaatatatcactctgcaatagttcaattccttgagtaataaaatacaaccaccaaacactcagaaataaacactagttaaaaaaaaaaaatgaaacacaagcctgaacccacaatacccatgcattgactcccaagaaaacagatttttacattccctaataaatacatgtattactatatccccaaggttttagcatcctcattgtatatcaggctaatgtctctaatacaaattctttttgaatttttcttagttaaaataatcttctgttttggtgtgtattttcaatttgttttaagattctgtttctgttgcttgcagtaattctttttattttcttttcctacagaatttactgtttatttccaaattactccagaccctaatagtctattttgcttttggcagaattcgtgtatctattgagttgcattctgttttgttgaatttcactcaatgcgtgtctctccaaaggcttcgttcagggacaaaacattcaactgcttctttagggcctttgggttgtgtttgtaacatgtatccacaatcagctgtcataataagccgagcatcctgattaattcactgtaccctccagtcgaagtattcacggatgtaactagttgaaatgcggatacacaagttcctactggtcttaaaagaaatgatttttctggtagttttataattttagcaattcagatttcgtacatttgaggttagaaaattcagcagacagcctaaatgcggcatcatgctaatggagtcctggaagctgctggtgttaaaatgagtaaattaaggagtcaacactgcttatttaggcacattaggataaaatagtatgagagctcggacttaacaaaaatcaattcagcacgcagagtgcacatccatcagggctttgttatgatgtcagggcgagcagcaaccctgttttattttatgaagaatgctacattagcatcatcgcgtccttggatggctgtgacatttgctgttatggaactactttgcggcagccacagggcccccagggactactccaactacattaaaaaattaggttggcatcaaatgacttattgaactctgtattgatatccttgggatttggttgtcaatctacacagtagttagtctcctttcacagcgaccgcattaagtaggaagttgtaacagttattgacgatttgagcaaattattttcctctatccagcccctacatacaacaacaatagtaataaacacagcttgagtgaaaagtatattccacatatggcatggatgctttgtttacatggtacgtggttttatttcacaataactcctaggtagatattatgtcctttctgagatttaagcattactttagtcacttaatcaaaaatcataaactgaagctcatgccattgaccccagttatataaaagaagtttgaaattttcttttgatctaggttttgcaccctgatagacttcacagataatgtaactaattagtaactgtgttttatttttgtgtacccatattctccttgccagaaaaaaaaaaaaagttgttggaacatactctttgctgtgtttcctcttggaaactattagccttcattattcagagtattggaggttagatatttaattttacaagcctaattattgactaacattttaataaacatttgacatttattaataagaattcaaaatatataaccatttaattttttacatactatctaatatctaatagtctcatatgaagtagaaaaaattacattcatgaaacactacactctattcatattatgatcacaccatcttttgttttccttcttttaaaatttttattttttgattatgaaattaatgtgcattcattggtaaagttcgggaaggcataataaagaaaataaagatgatatataccaattaaaggtaagccctgctaatagttgatattctttcagaattttttatattcattttcttctgtatatgtatacaattttcctatgtttgctttatatatattgttttgcaactagttcatgcattctaagtatatagcagaatttgtttcattaattacttgctattggaagttggttctgagctattttgaggatgaaaaacgtttctttgaccattcctgtatatacaacttctatgaaagaggcaaaaggttatgcatgctaaatattcagatgtgttaccaaaataccatccagaataacacctatgtaagaagttccctgattctcacttcacttttagggttaactgggacagtatggacattcttttcttaattcagtcattcaaagccatttgagtgcttactatgcattaggcactctgcaagacccaagagacagcagtggtaggagacagataatcctgctgcttacctggaatgtaccatgcaatgggtggagactaatctgaaataaataattgtacaaatgcctttctaatggaacttgtgctgtgaaggaatgttacgtcattgaacctgatctaggatggagagtcaggaaaagcttccctgaagaggtgacatttgacacttgaaaggggcaggtgtaatgagtttaatatatactgtgttacatcatgctaataactattaaccattgcatttttactgaggaatgctatgtatgttttggcacatcttaagtcagataattttattctgttttattgttggaccaaaaaaatggacaagttctcttttccacttctcttcccctttttgcccacaactacaattaacatgtgatggtccagaactattttttccttcttttttttttttttctatttaatgttacaaaggtaaacgtgtgccatggtagtttgctgtgcctatcaagctatcacctaggtgttaagcccagcgtgcattagctgcttttcctgatgctctccctcccaccgctccctgctcccccgccccacagtgtgttgcagaactatttttttttttttttttttgagacagagtctcactctgtcgcccaggctggagtacagtggcacaacctcccctcactgcaatcttcgcctcccgggttcatgccattctcctgcctcagcctcccaagtagctgggactacaggtgcctgccaccacgcccggctaatttttttgtatttttagcagagacggggtttcaccattttagccaggatggtctcaatctcctgacctcgtgatccacccgcctcggcctcccaaagtgctgggagaactattttttaaaggaaaatatggtctccaattcagaagagttgcacatctccaggatagggtttcatcttccaggcagtgtattcaggcagctcaacactactcattttttcacctgagccagctgaagttctagcggcagttgtctaatgatgatttttaagagtcataagcaaaaatgaggggacattggagcagtaccatatttagaatgcgaatattagtgcctccatagtctgaccttttctctctggacatattttatccatcactgtgtccacacatgccaaaatgactagtaaggaaatgaaaatatgtggcctttgaatgcaatttgtgaccaacattattttttgattaacagaatatatttttgtttcattgaatcaattattttatttagtatcagcattaattgtctacagacaaaatatctttggttctttgttaaacatttcaaaatgtgctttttattgtataaaactctacaactattatttccctagaagttcaatgcatacattgataatttattatgataaattgatgcagaatattgcatgatgtaatatgagtttcatgttgaattaagccatcacccctaaatatgaatctcaaagagctgtggctatttggtttctttatccaaagaaaaaatgattcataaccattgttgatgcaaatattactacttaagatgcaatgggtttctagtttcctctttgctgtgtaaaatgtatgcttggttgaccagaattcagtgaaacctctcattagggcactacggttcattaaggtttaaagaggcatcactgaaatttgaattggccatgctgtgattgccaagtctctctgagtggtaattgggctgtgttatgttgtgtgctttactgctgcaatggtttttagagttgttaaaaaataataataatagtgattaagctctgtgctatgtaaaactggcaagtttcttagtgatggcatctttttgtttataaattgagatttaaaaaatcatattcttacaaaaaacattcaaacaccaaatttgaatatcatactgagtttgttttttacttattggaaagagtatgttaacataattttgtttctatttcattttctcaaactggaagaaatatctggatgtgcacatagcactagaaaaatcaataagtaatctagatattgatttactgaatacccaacatgcagattgagagaaaccatattcaaaatgtgacaattcagttaaaagtgaactgaaacaagggtgcggttactaataggcagggaattactaggcagatgcatatcagagccagatccccaagggaagggcttatttcacctacgtgatagcacagtttgtactcaggcacttgagaaacaataatttaccataattgaaccagccacaaatatttattttgttaaatcagacccacaataccagcctgtctgtgctttgctggctagaaaatgtcctcatgagtcttaaatttatccttaaaatatatttaaaaaaataatcttaactggctttacctgtacctagttcaaatcgttttctctttatgcacggtgaaatctcaatgttggttactgtttctgcacatttccctcgggatggtggtttgtgagcatacctacctgtgctgctgtgttgcgagcctcactttgctcacctgggtttccccaagtgttgtgtttcaccactgggaggaactggccactgctgtcacctcaccacctaccataaggcctaatatatgacatatgtctaatatatatttgttgaataagttaattactctggattcctacctgtggcgcagtggctgacacacatatatctgcactgccttttgtgagtgactgaatgaacgtatgcatttgccatttgggaatattttcagttttatcgacgtgactgtttagaggcataatcacagacttataggaaaaaaacgtttaggaaataattctttgcagatatccttttggaatatccatgtaagatttgccttttgacagttactccccaatcctcctgcctaccttatccctcccattaaaaaaagagcaacaacagccgggtgctgtggctcagacctgtaatcccagcactttgggaggccgaggagggtggatcacctgaggtcgggagtttgagaccagcctggccaacatggcgaaaccccatctttactaaaaaatacaaacaatagccaggtgtggtggcgggcgcttgtaatcccggctactcaggaggctgaggcaggagaatcgcttgaaccgggaaggcggaggttgcagtgagctgagatcgcgccactgcactccagcctgggtgacaagagtgaaactccgtctcaaaaaaaaaaaaaaaaaaaaaaaaaaagcaacaacacaagatatctggcacacgttgtcctgccgagttgttgtgagtttgtcatcgttttcgtttgttgttgctgttgtgtaagcttcacgtttggtgattgttatgttcttggggatgcattctgactatattgggtccccttgagaccagtgttgcaaccaaaagaagcagagaagatgtagtccctaccctcccgcacctcgacttcatgcctttgcgagttttttttttttttttttttttttttgagagggagtctcgctctgtggcccaggctggagtgcagtggcacgatctcggctcactgcaagctctgcctcccgggttcacgccattctcctgcctcagcctcccgagtagctgggactgcaggtgcccgccaccatggccggctaattttttgtatttttttagttgaaacggggtttcactgtattagcctcgagttctttaactacttgatcttcactgaattgatcaggctgagaaagaaacagaacagtgtcagaagccaaccagtcaggtgaaaatattgtgttttgcaagtaaggggggttgaagaatgagagggatgggaaggagggaggtacagaggaggggagaagagcaggtgcgctaaggtatggaatggcagtttgaggaaggctgggtccacatcttctgttctgatgcaaccccctcactgctgcttcctagagggaccttcagaaagagccacatttgttttcaaggctttctggagttagacttctacctctttggggtgccccactggtctcaagggaatccaacacagtcaggatgcatccccaagagattgtaaatacatacaatttaattgttataattatctttttcctgtttgcatctcagttaaacattgtaaaaaatgttgagatgctacttctcttaatttcagttccctcacagagcagagcctgagtcaagatcttgagtgcaagcagtttacttgacttgtttatttgacttagcctgggaagtagaagtgaggtagagagtgagctaagaacaggggaaaacccagtgaaggatgtgctgtttagggggttaccactgtgggcaactgagttttggtcctgctgggaaccctctgaagaaccatgtagtaaatgtaacctcaaacctgcctatctaagtagcactgttcaatagaactttctgtaatgatggaaacattgtgtgtccacactgtcttctgccatagccacatgtagctgtttagcatctgaaatgtgactagtgtgactgaggaattacatttttagcattagttaattttagttaacgtaagtgtaaatagccatatatagctagtcactgctggattgcactgcacaggtccaaaggattggatgttcaggcgtttatcactaactctcattccatacgtggggcttatggggctgtgggtgttaactccctcatacttccaacctgccctgcaaggggctaagatagctgccatgacttaggagaaatccctgaggaagaaaaaattgagagaatcaaagtccttaagaggagacactgccttgatacaagaaaactgtccctgacagctgcagaagaaatcacaggctgagaggacacacaggaggcacaaagtacccgtgtgatgccaccttatgaggcattgaaaaagtgacagtttggtatattcatatctgtttttacgattctgaagtatcaaagttcacatcataagaaacgtaattctggtaataatcctgaagttttcagttaatttaatgcttggaaacttttaatgttttctaaatagctttttttcctctcttttaaaacttcaattatttcgattttactctaatgtaggtactaggacaaaacggtcacctcattagtatgtagtattttctgtgttttcaattattacattttgaaatgctagtggaaaatgctgtctgccttacttttttattttcatagaagtgtatttgaattggtttcaaccaccataaagactatttcaacttatttgttactaatgatgccatagcttagtaaattgcataagctgaataaaaatagtataacaaaaaatgtggcaactctagtgattcaaaatgtgaaaaatgatgaggctctattttcttaaagttagatttaaactattctatgaatatttacattttaaaaaattaaattttctgagaaaatcttgcttatccctaaagatacccatcaagctgtaaaaatgtagagtttatatagataaatgaaactacataatatattagagtgttgctatgtagatatgaaaacaaaatttactcttgctttttgcatttctatgaaataactgtttaaaggttaggaataaaggccaaaatttgcatttaaatggatatattttaagaagaaatgccaatttgtgacctttacccttgccgctagtatggttttttttttttaggattaacaatcaaacttcagaggaaacactagaaatataagcaaattgatagaaaatgtttagtttaaacagcttcccagaaaactgtttttatagcctgtagggagggctaattgggccttgtcatgaatcagtttaatcatgtaaaatatatttgatgactgcaatgatagtgaaagattgatccgtagtggtataaatcaggggtcccaatcactgcagactcagtggaaatgaatagttaaaattcgaagggacccattaagtgtatgatggcaatcacagatttaaggcttcattctatatatttatgtatgcattttaaaatcttaagaagatacttcaaaatatattagagaatttttaaatttgtaaaatctacaatgggtactacaatatatctacctgtgaaccaccacagttgctggttgaaattactttattctattatcttccaagttgtattagccattgttagatttcagtgttatcagggtaatagaaattaggtagtgattcaaagtgtgttttaaattattcctctcttttcattgactagttgcatgtctatgagaatatgtgtgtatatatatttatatgtgtgtatatatgtatatgtatagtctatacagattgactatgtataatatgtgtgtatatttatatatagactatacatatatagactctctatatatacatacatatgtatatatgtttgagtgagtgaatgattgagaaacagatagattcatcaaagctgactctcccctttatgtggtatagtagaactgaatggaacatgtttttagtttagtttttgctgatgtgtgcatgtaaagtcctctataacaacctttttttccaaaactgtgccatttccggcactgctttttcctccattgttactttttgtttattacttgcaccttggacacatgggggaaaagtcaacctccctggacaggttcaggaatcagaggatgaaggaaagaggatacatgaagacatatatgaagtaggagttctatttagaaatgaaagaacatgtgaaatatcagttaacatcggttcatatggagtccaggattctatttaatatatcagatagtcagtaaggtctaagagaggcaactgaagtaccctatttagaggaaagttggcatcatggaagtttgttagccattgcctgggctcagccattaggaaattgatattaagttgggacattcagtccttggtctactagagaaaaagacttagaaatctaggctcttaaagtctgagtgaagctaagggcaagtacagaggggatgacccaggagcacagtgcctatgggactgactctacctaattgtagttgcttgaggtcaatgtatcattgaatccacttgctcagatactggaccagagcaatttctactaccattgctctggaacagggcattgcaccattctcttagaaactggaccttaagaaactgtggccatttcaattccattttgatatttattacagatttcttagtagatgccagacagtgtgttaggtcccatcactcatattgccttagtatccattagggctaagtaccattttcttagctacactcttccgcatgtagcttatttaggaaaagtcgggcaagtgggttacagacatagtagaaaacattatgtcaaataacaacctgcccagcaatgaaagattttaccacgtcctttttgattcctatttttgctaaacaggtttaaatccttaaatggttacagaattcccccaaagagtagattatttgtaggtattagacaaaaacaatcaaacaaacaaaaaaaaccacaacaccataaaactaataaacacacacaaaaagtgaggggtccgtactcaaaaaaaattttggaaaagagtgggttaagcaagttattttacttctactgcagaggaggctttcagtttgctgttacgctgtaatacccaagagagactaatgtatgcagagtttcccaaaatcatttgatctgggaatagtttgtattgaagcatctttagtgactggtgtcctgtagcacaaattcgttaaaattccaatgctccagttttatccatcactaggaggagctaacctcagagaaactcagggaaggatgctgggaatggacctgctggttgtacttcaaaagaagcaaaggcaaaggggtccacacagaagccccaaagagaatcaaggttaatgaagggctctgcatatgatgactgtctttaaagtaggaatcctccaatctgaaatggcacagacactgaagagatagaattaaaatgtctaaaattatgaatgttatccataggttgcctatactagtcaatcaaattctggaagatggaaatgactagataaatccttccccttgctcccatcttgaggattaatttatgggtaagaggtccatagaggcttgttaataggaaatcagacttttacagctatatgctaacttttggcaatgatagacagttaaacagaatacttacctgaatgaatcagtttggcagaaacatgcacaggatttgaaaattttatgattccaaaagcatatctgaacatatgccaattgataacaaatattagatgatccaagaactatttggtgaaataatgaaggtagtttgtatagaaagcacctgtgcttatagagttcataaaagtttttcaaaatgataagaggaaataaaactcttgtaattaactagaaagatataatgtattgatctgtaaattaaagaattttaaataatgagtgttttctctcttcactcttgagcctgtttctttcctcaagaaaattttgattcctaaagactaaagtggaagtgtttattatgtatgcataataaatatctagaaaataataaatatctaaaaaaagacaaatcaacatctgacatgaactttgtctttccaaagaccatagaatgggctatgagtgaatatctttacaaagacaaacttatcattagaacatttttggttgtctaacaggcaggaaattgttaaaaaaaaatcttgttgcagtaatggagaaaaattagatgttcataggagctcccagtgaggataatcacatctgaatgcatccttgaaaataaacacaactcaacattttagtgttctattatttaaccaattggagtatgaatggatatgtaacaaagcttcaataatgtgtttcctcccagtaattgcgtttctttgtaaatgtctgtcctttgagctaactgtgtcttgaaatctcctgacttcataattctcaaaatcaggtgtctgagatggtactacaacaggctacttgagataagagtgaccatatttaatgatattgaccagtcaactaaacaaaataattattttgatcaatctttaccaactaactagcaaaatttaccttactatgacaaattctaatgttttacataggaaacaaaatactaatggctttacctatatcatgcccaaccaggaaatttaatttgattagtgttttgcatatactaaaatatttctatctggatacatgcaaggctccacagggtggggttagatttttttttttcaatgatacattccacattccccctgagggaaatgtcaactattatcaggcacagccaaaaaacaaaacaaaacaaaacaaaacaaaacaaacacatggaaacaaatgaaaagaacaaactgaaaaagtgttaagtccatactattgggcaaaaatagtagttaacatatgtaaaacaaggagaattgttcaaagcttttttttcttcttgatatgaatttgttgtaaggcaaatatcttgtttgagtcatttgtttattgtgtgtaagtgtatgtgggtgtgtaatcattttgcccatctcttttgtcaggaaccattaaattcagtgcccagaaagatgttgcaaatcagctactataaaattagaatatgctagaaacttgtaattaatagtataaaattcttttacaagaccagacgatggttctacattttatgttatattaaaaaatgagaaaacgtcatttgtgaaatttaataaggcagaacattattatgttcatattgaaagtcagactaatctgagtggattaagggtgccttgtggaatatcttgtgttagttgactaattcttgtcctcattattaatgttctgcagcaactgtaatacctacaagtaaacatcaattgaaaataacttcataaacatttcttaatcaccacagatagaatattgtttgctgtgttaatgcagattaaatagcataaatttacttttatctctttttaaaaaaataaattttgaaaagcagattagtgaatggcagagctgtcacccttgataaagctgtttcacatctttggagagcttaaacatgatacactgaagtgtgttcactgtcccttatgagcattaagtggtttgtaagataaaagagagaaaccagaagtgagaaggtttctattacaaacttagtcatatcatataaagggatggcgtagattaaatccctactcccaccctttgccacctccccttcactccccagaacttcaactgtcctttatgacacacaactgagcaggagacatagaatcacatttttcacagggatttgaaatgtctttgtggtcatggtctggcagtaatagaagccatatgctgtgggtcaggaagaaagctatctcgaaacagaagaacccatctcctggcctaatgaccttgggaacgtttagtcatttcaaggcatttatcgttgaagcagcgtaggggtcgtttgggctatgttttcctccatgtgactccaagttgtgagggggagaagtgcatattatccataaagaagacagcatcagtgataagtaagtggctaatgtcagtagcaataaaattctcttccagggcacctgttagctgatttgttgtagattgatttgcatttccctttgtgattttgaactccttttagcttcttaatactttaaaacacaagtctgatggaatgagagatcgcatgaaagaatttgatttaagctgagtactttgtggacattggaaaagcagcttttgtcttaaattacattgcctttggaataccagcatgtaagacaaagaaacatgatctttgtaatggctgttggcccatctccagttgacacacacatgcaagttatatgggctgggtcacttgaggtttcccatttcccataaaataatgtttatcatggcatggtggggcttaaaattggttcctaagtaatttttgctccagtctcttatagttgtctctgagtatgtccccagaactgacagtgatttggaggcattgaccatttaacatgatactggtggacattgatcagatggccagtatttgggtaaaacttatatttggaagaggagaactgatttttggatattaggaaaaagagagccccctccccaacttcaccaacactgctgaattccgattataggtataagcaggaattttctaaaattttagattaggttttaccagaaattctcaatattctactgctgaatctttaaactaccagacaccttttgctctccattttctcaaattggaaaggggtgatgaaaatggtaaaatgtctcttccctcttcctttgttctcagggatgtttgttactcatccttctacttgcagctagtatataaaacatcttttagagtctccatgtcttttttttttttttcttttttgagatggagtttcactcttgttgcccaggctggagtgcagtggtactatctccgctcactgcaacctctgcctcccaggttcaagcaattctcctgcctcagcctcccaagtagctgggactacaggtgcctgccaccatggctggctaatttttgtatttttactagagacggggtttcgccatgttggccaggctggtcttgagctcctggcctctagtgatctgtccatctcagactcccaaagtgctgggattacaagcgtgagccatcacgcctggccagaatctccatcttaaactggcttcctgaaagagtaaattgatcaagcttaaaataattttctgctgttctttttttccagtagggacaaggtcttgccatgttgcccaggctggtcttgggctcttggactcaagcaatcctcccacctcagcctctcaaagtgctaggattacaggcctgagcccccatgcccagtctcctggtgttcttggagggttttcctctgtaggtacttgttcatttgtgtccagagagacttgggagactataatcaatactcttatcagccagaacaacatacattaaaactaaaagaaaaagaggaaggttgagttaaactggccctaaaaatattgatgttctctcattggaaaggttgacaggttctttcaaggaaaggtcatttcaggaacataagaagtctttttcactttactctttgctcttatctgaaagctcatcacagtgttctataatattttatcatgattctgataggtttcaggatgaaaaatggaatttggcttaaagagtgcagggctagtatgaggacactgcactctgaaataagtcagagtgatttgtcttcatcagatgttccataataatacttaacttttactgtatgacgtgaaacgagtgttattatttcaaaaaatgtatttgtaaatttcaggtcaaaactaagaataactctaagagtgtaaaaaataacatattttaatgttaaatttttttattgcttacactctaaatattttcctttgaccaatatgagaaatattcccattgatatctctgtgcatttaaacaattgtgaaaatagagaactcagttatagttaaatgactgatgttctataagataactttatcacatagataaaataatgaagaaaagaaattaaataggcattcctctgagagtttctctgacaatcaaatcagaggttttgattgaaaaattccctcattaatgtagattgagtgaatgaactaattactttgtaatttgttctaatagaaactttccactgaggtgaggggcaaggggaaaccccaccgtcttcactgtcatggaaaagataaagaagtaatggatctttgaaatatttcccctaactttcaaaaccttagcttacagtgttggagactacctgagattacctttcaagtagatgttttcaggaaaaaaaaaagaatatagaaaggcagcccttgccacatacaatgtatttgaatgacactacaatgcagcttttgtaggtgatcagatagaagtgtcttgctgttctattgtatttcagcttgaatatccttcatcaaggcagttactgcaaaacaatgttgtaaatgaaagttaaaatgacattattataagtaaacttgagttttcttttattacctgtcatttataaggtggtaatgcaccacgaaaggaattgcatattttgggtaataaagaaatattctatgaccttggtattacttatactaagattggttttaagacttttattttgggtactatagagtagagaccatgtcattccccctttcctaccccatttagacattaagacattcttagtgatttttttataagtacctgtcttcatccattttctgctgctgtataacagaataccaccaactaggtaacttacaaagaaaagaggttttttgtttgtttgtttgtttgtttattcacgagtctagaggctgggaagtccaaaattaaagggctgcatctggtgagtgccttcttgctgcatcatggcatgattgaaggcatcgcatggcgagaccgaccgttctctagagagaggaaatgtggcctaactcccttcttttataactgtcccacttctgcaataataaacccactctcatgataacagccttcatccattcaggagggtgctgccccctgacctaatcacctcttagaggtcccacctctcaagatcacaatggcaattaaatttcaacatgaattttggaggggacattcaaaccatagcagtaccttttttctgaagtctccccagagcagtaatctttagtcctgaatatttcactgaaacacttacatgtagaggtattttcttaaaattgagacctgtctttattaaaaattatttatagtgatactcttttctgttctgtttacagtatatctgaggaaatataaagtgtatgctattaggctttgtaatgtcttattattaaggcagatataatagctttaaagagaacactgatggatagctttttagactcaaagcagatatttgtgtgcgattaaagtagaaaatgataccctacaattgttgagacatttttgatgttctttggctttccacactgatctttttctatctctacagttagtttggttttggattaatgtttttcattcagatataggaaatcagtagcacttgaaatgccatccatagtacactgaagtcttcagtgaaacaacagagtccaatattcaatcagaaaagaaaatgaactctaggagtcatttccaggagacatgtctgaagtcaaacttgggctttatttcctgtcttcagagggtgcactttcatagttgttttctataaggttcaaatcccagagtgtatgtgccactctctctccatttataccataaacaaaaattcaggtctttatcatttcacaccctggctgtcaatgtggctgtctctccagcttctggtctgctagctccccttctaccatccccaactcttattccctggcttaatttttataaaacaactatctgatcatctcatttcatgttcattaactttttttttttttttttttgctgcctctaggatataatgtctaggctctttgtgttatgactggggctaggaaagaaagccattatctaactgaatggcctctgaaggaaatattagagcttttctataaatttatttttctcatccttctaaatctgcatgtttgtatatattttattatatatatatactttacccatacagtagtatatgcatataattgatgaataaaaatacatatcttgggatatgctcaaaatacattttactaagagaatgcatacatgtggcagttatagattattaatgtcactttatttttctcttcttacttttccactaggtgagcaaggcaggtaaattaaatctgtcctgttgatggactgaaaactaacctcaatacattctctcaaatatgctacaggagttttgatttgttcatgaatttatttttattttcctacaaaggcaactggtaaacactgcctcgcttttgtttacctcctttctttttgacttttctttctgagaacttttgttttcttgggcatatttcaaagagctactaactttatttcttacatttggcccaaactggcttctatttgcccactcttgttaactcctttgccatgagactgtacttttaatgtatactctttgtttgtacaagttcttttcttttcagtagttgtttctctttcagccttaacttatggccctatgttctgatgcttgcaacctgccaagtactttccaagccctacacccctgtggtcatctggtacaattggtactgccattagcaccacttccaccatcaccaagctgtcctgcctccattagttcactttgcctcttatgcttcttctctcacatagatatctcagtgcatatctgagactatcctggccttccacctcatggttcactcacactgattatgagtttttcttgttctaggagctaaaaatatctctcctgccatggcctgagggtctcaacattccatattctcttcatagtaagataattttttttcccccaaaatcccagtagtctgggtggcaaagtactggttcaaaaaagttgatagtcccagcactttgggaggctgaggagggtggatcacttgaggttaggagttcgagaccagcctggctaacatgatgaaacctcatctctactaaaagtacaaaaaaaattagccaggcttggtggcagatgcctataatcccagctactcgggaggctgagacgggagaatcgcttgaacccaggagatggatgttgcggtgagccaagatggcgccactgcactccagccttggtgacagagcaagactccatctcaaaaaaataaaaaataaaaataaaaacgctgatagaagggcatctcttcataacactaactgtcccctgactacctcaacctaaatactccttcttgttttctttttcctactttagtataaactcagatactttaagacaaaaggggtacttctttctctcaaaaagaaaggcataaacatagtgtcctaggcaaactggtccttatgcttactataaatcaatccaagacaactaactatcaaaaggaacagtagaatattctttctggaattttaacagaagaagaagagccttccctgtggattttctgagtgatatatggattcaagctctttacattctggccctgtctgccttcttaaacgtatctcccttcttctttttctaatattcctgtcacattgagctattctctatttcttagacacagtctacctctctgcctttgtccatggccttaaatgccttcccagccacaatctagctgttgaaatctcatccatccttgaatatctagctcatgtaatggtaatggccatagaacagcttctactaaccacccccagcaaaagcaacctctttctctctcatgtgatgccttatgacatttatttcataatcttgtcacatcctcactttatgatttctcgtatgtaatttaaaaaattacataatatctaacctgctagtttgtaagttctttgaggacaggttctatgtcaaattcatctttgtatattcctgacagcctagttacaatgatattaatatattggagtcacagttgtatttctagagaggattatatggctgaacaaaatgtttcacaatgatatgttcttctgatggaattttttaacctaagattactgagaatttcttggtcagcaaaaagacaggagtatatcattctgacactcttttgaggcacatgtttattcaatgtccaccctctcacaagcagatatttaataattaaaaaaagaaaatctgcagcttgattatatgcttagccaagaaattcttttgcagttctaaggaaaatctccagcaaacccaattactctcccagcaatgcacttcaaaggagagcagaatgcatttcttgtacagaattcctggatatgtttgatcattagttagggcaagtagtttgacttgaggctatttactcagcaggaataaaaagtacagcattgcttcaaccaagaggagtgccccataccttccccaagcagaatttaataatttgatctgtcagaggaggtacagaggttggctatagaaatgagtcacgaccagtcagatttggctgacttgtgggccattaaaaatgttccttcccccaaacggcattttttaggaataataataacagaaacagttggcaccatgtaattgaccaagaacctgagaatttcacagcagtacttatcactgaaacagtttttgtttttttgagtctaagccaaatccacacttgagtatttttttaatttatccaggtgttctatggctaatatttatttcatctagcaagtgccacaaagtatttttgatgtagtcaaaaaaagtatttctgatgtagtttaaaaaagtatttttggtgtagtcaagaatataacatgatattattagactcctaattacaaatatttggtagagactatcagtttaagaaaaaattgcattaaaatgtcaacttttttctttttttgagacggagtctcgcactgcacactgtcacctgggctggagtgcagtgacgatctcggctcactgcaacctccacctcctgcattcaagtgattctcatgcctcagcctcctgagtagctggagttacaggcgcacgccaccatgcctggctaattttttgtatttttagtaaagatggggtttcaccatgttggtcaggctggaagttttttcgaaaactaaatatatatttcattatataaggtagactttacactttttgggaggaaaatgcacatcaccttttaattttttttttgagacggagtctccctctctcacccaggctggagtacagtggcacgatctcagctcaatgcaagctctgcctcccgggttcacgccactctcctgcctcagcctcctgagtagctgggaccacaggcgcccgccaccacgcctggctaattttttatatttttagtagagacagggttttgccgtgttagccaggatggtcttgatctcctgaccttgtgatccgcctgtctcggcctcccaaagtgctgggattacaggcgtgagccaccgcatccggccttaatatgtaatttttaagcactttaggttttaattaaattttatttcagttataaaaatgttcattaccatttggcatattcctcagctaaaataattaacaataattaaaattacccatgcttgattttcttatttcaatttttataaaagttatgccttcagtttatagaaaataaagaaacttatgtacacatcgatgctttagacaatatctatttttcaccatgaatatcactgaaagaaacaagtatcttttcatctttagacaaaagaaaaaaaagtactagtgtatcttttattattggttactttaaaaaaagagtaaaactacttctgtaacattaatttttaaaagttaattctcatattctaatgggagtgtaatgagtttttctcacagtgaactctaatgagtttaggaacgtgctgccatatttatggtagagactatgcaaattggactgatgtttatttatgcatttatttcatttgggaatctagttttcgaccttaagtttgctggagaatttgttacaggaaagaaagtgtatgaagaagtcttcttgtcccaggtgtggaattaaggtaaaattaacaaggaattgaagttatctttgatcatgatttttgattccatttttattcactttgaggaagtgttgcctgttttttttttttttttttttgatgttcagcagagcagtacaatgcaacacacagaagcataatgttgaattttcataataatgtttgtgatgcaaatgaggcacacttcaaaaagtagaatgattagcatttcttggtaagatgacagtccccccttttaaaaaaaaattgttcattagttttatcaatagattacatatccagatttcaattttgagtgcatactttttgcttataattataatgtgaatttaaatagttttagattgtgcatttaaaacaattcttctgtcactgtattatactctgaattaatgagctgtttgccacctcagagccctttgctttgaaattcagtccagtttaaagtgaactccaaccatttcaggccagcagctcacagaaggttgcaggattaatgagctccaggggctctgtggcttccttagaagcatttatcactaaattctattcttagggaatatcatccttatgcaagaagatggggagctgaatgtggaaaaatgctattcaaacaaataatttgataattgccaatgaagagtgttctttcttctcactacagatgaaatacaagagatgcagctaagaccagagcttttagtttctctaactggagtgaaattaaaattgatggatattttgataagattactaatgtaggtgaaacaatgcttccctatagcttgttctacaacactgtactcattcacttactggacttcctagggcttacttaaagaacttgtacacatccactgtcaaatatacttctgcatacatatactcttggatatcatagcctatttataaaactgtatctgtctccctagttatcctgtaggaatagctagtgttttctctccttttagatcttctcaaggcatcctctgagtttataaaacagagagtaatatgggtgagaaagttggcccttgctctttttttttctttgagtatgctgtttttatttaattctcacaatatctggagatagtaatttttaacataatgaaacagatttagagcaagtgcatgacaagtaaaaagcagggccggaatttgaatccacattcatttgactctaagcctgtactgtctgatatagcaagcacctgtagttattgaccacttgaaatgtggtgattgctgcttgttaaaatcataataatttcgatatattcatgcaaataaatatattactaaaattctacctagagaggcatttcctgggagctgacaatcccctttttaaaataatgattattaattttatgagtagattatataatcggattttcatcttgaaggcaaactgtttacctcttgggagagtttgtgtacctgaggttgtgccgtctaattagggcagcctgggccaaggatggtaaattcatggcaatcacatggatactccacatcctccggcagacatcacttatcggtcgtggcatttttctcacaggaacagcattctgtctcactgagacacagccttggaattcttctcagtactgttcattgatccaggcagcccccacctcttgactggagttggcaagtgagataaacatgttagctgactctcttctggtcagggctctttggcacagttaggtgctctgaccttttgaatagacctgcaaaatgcaagcctatcttcagctttcaattagatgttaggatatgaaaacatgggcatctttaaattgatgaaatattcagccacttcaggtctgtttcttcccagctaatcatgcttgtcatctacattttattccaccaactttattcaggttttacccctcacctcatgattgctttattgctagaatgtgaaaatatcttctatgcctaaattgatatccttgaattaaaggtgtgttgatgttgcgactctaacttcggtgtgctggggctgtcttgcagcagtagggagtgaagtctaggcctaccaagcattacgtgatgtccttcctcaagccctctctcagccaggcacagtggctcatgcctgtaatcctagcactttgggaggccgagacaggtgatcacttgaggtcaggagttcaaaaccagcctggccaacacggtgaaaccccgtctctactaaaaatacaaaaaattagccgagtgtggtggagggcgcctgtaatcccagccactcgggaggctaaggcaggagaatcgcttgaacctgggaggtggaggttgcagtgaactgagattgcgccagtgcactccaacctgggtggcagggcaagactttgtctcaaaataaatacatagataagtagtaactctcacatctaaagagcaagagcagactgtagcagataaatgtcccaataaaaataggctcctaacccttactctggcatttgtgtttcatcgtagcaaatttggatgcaagaaagctattgaaactgaatcttctcctacacctgaagagatctattacttcaatcactccaccgaaaaatctaccaaagattaagtatgtttctctattgtattcctgcaggttaggattgttacagatcacaatgacttaatgaaatctcaatacttgtggccaaaataacgtaggatggagagccatagtttaaaagtttgaaagctttgggggtcatctaggacactgaaattctgcttgcaacttgtttagctggaaaacaaaaagcatgaagataagactggaagatgaacatctcataccatcaatatatgggtgattagaagctctacaacaattctaaaacccagcctaataaagtatgaaacattctgaggaatgttcataaagatatgcaaatggactttgaaatggaaaaaatgcaaatcagttgaggtggcacaggcctaatttacccattctctctcagggaatatcagagcttcacacatttaacaggaaatgtacacatgctgacttccttcaggtgaaaaaaagattccacctgcaactagtattaaatatttgagatttgtttgccactgttgtatcacagatgcttcaactagagtgtttaattttcacacatataccatttaggagctgtttagtcctctccctaatgaaagagagatgggaaatccaggacaccccacacttactggtaggtttccaaatgttccgctcttagatgccactggtacctctaaataattcaaaatatcgaagagctgactccacacagcagaatgtgttttcttagttggaattaggtctataatcagacagagatgtcttattagtcagaatggaagacaacggactggtaaatattataatttgaaaatgttgatataaaagaagcctcaacataggaaaaggtgacatgaatgtcaatggcaattataatatataaaaaagataatagtgttttagagagtgatgaatagctgtgggaggaagagttgaggccagattttgcaacttctaattttttttttaaacctagcattgacagtacagtcctgaattgttgtgttgtgataggacataccttttgctattaaaaaataaggcctcatattattattaattttttttggccttctgcctaggaaaagaagtatgtctttggaaataaaaatacacaaagtaagttgtcattgagggaaagagttaaaaagaatcacttaccttttatgaattattttttaagactacacaggtgagttttttggttttggaaattcttgaacattttgatttcattcttcctggagagccaccgatactggaggctggacaccacataacaaattaaccgtcctctttcatttgtaacctccagggagataagatcagtttagttgctaatgaattttggtccccagcacagaacaattacaatggaatatgaggacggtttcaagagcatcaggaagattttaccaaattctatttaatctcctctcaccctgtttacaggtcagcttattaaagttgaaaattcctggtagatggtttccatggagagagaaaattatctctttagataaactattctagggttaatttgattcaaccaacatttatttagagtttcacatgtgaaacacaatactgtcttaggagctacagggatactaagatgaacgtggaaaaaaatgattgcccttaattaagttggcatgaagttcatgtacacaaagatgtacacggatctaggataaaatgtggcaagtactatcatgtaagtataaataaataaaaaattgtactcttcatacaaagtcttgtttgcccctcataacaaccctatttgaagagataattattcccatttcacagaaaacaaaacagtgtcataaagcagcacatctggtaagtaaagccaggacttgagcccacgctgtataccagccatcccacagagctttcttgatgctagggagaagccagtaataaagcatttcatagagaaggtggcatggtaatggaccttgaaagacaggtgtcatctcaaaaggtggccagaggggacatgtcagagagtcatgcatgaaagaggaaatttaagctttaaggacaggacagatgagacttccaaggggagagcagagattgggaagagcatctgaaagtgagccctctggaacactccatgagggatgggagcaggcgggaggaggaagcgcaggagccagctaaggagacagggaaagagcagtctggccgatgtgagatcatcttggacagcgaggtggccaagaaaccaaggtacaacagtgcagaaaatcaaagaggcccccacagtagtccgtttcagagagaaagatacacagagctaaaaggaccccaagagtcttcttgatctgggggtcactggtgactatagaaagaatagttttattagagtgatgataagccatagatcatgggaaaaattgcagtgggcaaaggatgaagtaaaaggggaagagggtgacatgaaagttgatcactgtttcaagaagtttagtagtggaggaaagagggaatagtggtattagttttgcacactcacaagcccaggtaggatcctcattttggagagcctctggtaacatctgataagcgagcaggccccttaggtggctctgtgacagagcttttgttctgaggatgccagcatgaggccacactttagtatcaagtcacaggacccctgcacctttgtgtgtcagcctgacctggggcataggactagagggcaatgggaaatcatacttgtccagttggaagcaaattttttgcagaaatttgctttcatggcttaacattcataatgccttaggttgggaaaccacccatgcccatttatgggccatggttaattctgttttattctgttcaacaaacttatccctaggtactctgtgtgaagccccactgtggctcggagtctacagcatgtttcaaagacgttgctgtcctcaagaaacataatctctttggggaagcaagaagcaaaagtagccctttactgtagtctgatgaatgttgccgtgtaggaatgggtgaagggcctggtcatagaaggacttacatatcacgcttggcactcagatcttactctgtagataatggggaaattctatagtgttttaataggaagcagcttcactgttttcatttattctcactgaggtgtgaacagtgtgtgtgtgtgtgtctgtgtgtgtgtgtgtgtgtgtgtgtgtataaatggggatagagaagcaagtttgtgacatataaagcaacagtctagataagaaaccttgaccttaattaggccagaggaagtgggtttggagagggcaggtgacacttgcttttgttagtgactgaattcactaacaaaaggggtgcggaagagttaggttgcataggtgcttcctgggttttttctggttgactggaaatgctttcatggcccgtcttcctgtctaaattaagatgttcatagatgttttaaaaatagggtggagtctggaggtagaagacaaagctgtataaagtcaaagtagggagaaaaaaaatgaagaaaggcaataaagagaaatagagacagccagtaattatttgctgtcacaacccattcttaggtcacctttcggtttcagttttccagcaatacttttctttttttctcctcttttcattattaaatgccttaagaaatgagtatgctgcatcgatagagttatgatggcttacatgagaagagcttctgagaagtgagttcctggaagcactgtggtggtggccaagtatttgcttataagattttatttgacatctataaggagaaatatacacaaacttttttgttttgttttgttttgttttgttttggtgctggaagtgggaaaagtaacaagaatttaatgagtaataaggaaatgtaagaggaaccattaaacataactatagttacatggaccctacttactccaagtgtattttagttagatttgggtgtattttgtgtctgttaaggcaggtgggcagtttgttcatttggctggaatcctggggcaattaggtcagcattaggggcttagtatttctgcaggccatttagttttaacctgctccatgaccccaggacactttctacctcatcattaccctgatttttgtccgtgagttcagggaggcaccaatcagagaatgtcgatagctttctagcacatccatcttcaccaggagaaagctgtggtcagataagtaggattcccctttacataaaaagaacagcctgttccatcgttagaaaaattagaaactgcggtgagaagtgcaataattagtgactactgaatgcttgttcttgaatttgctttataaaaaatgggatctgggagccttgttaattatatagctttgtaagaatagtttttctataactgtattagtatacttaatcaatgactcatagaatactggtaactaatagacctggacttaacgcctggaatgtcctactaagcatggtttggtgagctgtctactttgattctaggatagtttatgtttaattatgccacaacttgggcttatgctatgtcttgatgtaatgcaaataaaatagattatattttacactacaaagttcattaaaaaacaaaaacaaaatccttaagcttgtcactcaaaagtaaacatctgtatccaatgcaggaaagaatgcaggtttcgtggggactaaaacaacactaaggtgagctctctttaagaaaaagacaaatgggccgggcacgatggctcacgcctataatcctagcactttgggaggccgaggcgggtggatcacaaggccaggagatcgagaccatcctggctaacacggtgaaaccccatctctactaaaattacagaaaattagccgggtgtggtggtggacgcctgtagtcccagctactcgggaggctgaggcaggagaatggcgtgaacccggcagacggagcttgcagtgagccgagatcgcaccactgcactccagcctgggcgacagaatgagactccgtctcaaaaaaaaagacaaatgtacaatataaaattaagtataaagtggttatttaaattcagtctttcctgtaaggtgatggaattttcaaaaagtattaatagttgagaaaggtttttctccattttataactctcgattgataataacgtgtacatttttagaattgtggttaaacttgggaagacttctttaggcttctttcccgatgaactgcaagattttacagcatctcaaaatttctggtgcagggactaatcttaaatactttggaactggctgtcttcattaactagcttgttaccatagatttctcacatttgctaattaaaaaaatatgaccatatgaacacattgccaggaccccatccaagtccttaaaagggacctggcgggggaaggtccctgaagcttaagctccattgtttcatggtaaatttatctctgatctgacagcatcataattttccactgaatctgtccaaacagtattatactcaatagtccaacaaaacaacataacctttcatacttaatacaataagtcaattggggaagaattcagaattttagtgatcctaccaagttttttttttttttttttttttttttttttaataaggcacagctcaattcttatctcttggtttgactggcatacaatggcttattgtaagactattacgttaatatctttgtatcttttacaagctttaatttacccctgatagcatgaaacgagactaaattctcatataagaacatgaaaacatttttaaagatgttatctcttatggtatgtcttatagtccactgactagattagttgtaggcatctaaaataacaagtaatctcaacagatagtatatagttaaatagaaatatcgtatttctaagcaattaccttgtaaagagaacccttaacattttaaaatgttgttatttctaagcctaaaataaaatgcagcttgttatttaaaagatttcagaagagatataaagatcccattgcactttacatggctttgtgttaaatttatcaagatccattatattacatgaaacatacttagtttcattaaagatgcttgagcctctctcttttttatgcttcctgccccctctatgtacacaaattcagcaacctaatcatgttgcctttgatcaaattttatttgtatttttccccagtaatgctgtctggtggcagttaaatagaatttaattaaaataaatattcacatgctttaatagagattaatgatctgatttgacttagtaaaatttggcaaaaagtctagacgctgtaagatatacctatattacttgacttggataaaggtttaataaaacacagccagcattcaaaaaaagggagaaatggggaaatccagttataaaagctatctgagcatttagctagaactatgcatacacaaacacgccctattgaatttgtgtccacaataaaaattgggctgtttcttgtttttctattttattacaaccataaaatgaaagtgtgaataacaaggcaatccacttgttaagtggcaatttggattgacaagctattttcccaaatttaatttctggatctgtacttctcagcctttaatgtgaacatgaataacccaggggtggtgtgaaaatacagattcagattcagcaggttttggacaaagcccaagatactgtgttctaacaagatcccaggtagtgtccatgctgctggtgtgaggactgcaccttgagcagcaaggtcctagacagtgaagtgaagagactagatttgggatggttgccgccaccatcatcaccacaattgtatggataataatatgtaaatgaccccacctctcaaatatacagtcctttcacatatttccatcatctcattttggtcttcacaatatataatgtcacatgcgtatctcagcctgagtgccactgcttgtaaagccaattaattacataagaatattaaatttcagagtcttaacccatatagtccagcataaacaaagcatagctaggtttatctttccaaagggtattctccaaatcttgttattttctcactcaagattcatccagtggaatatctcctctgctccccaatcccataaaccgttatccctattctctctctgttctccaaggctgatcatctcactgtcctccacacagattagttttatttatgaatccaaattctgcacatgcagttgcctgaccaagaatgctcccacttatatctcctgctcttcatgaaatctggtaaactacttcctgcacacacaggcgttgaggggcctggccccttatcatctgacagacctgaacaaggtgaagacactctagagctgttggaattgttctcatgtatgctgggagatattttttagcttccttatgtgctgcattttaaaacaccctaacatttgtgcccattaactcccaagccctgtttcttttagataatgtatcaagcaaatttctatagttgaagttctgaagtgtgacaagggagccctgccttagcacacatgtccagatgttgacactacaagttataagcagccttcatttacaaaattcagacttaaaagccacgaagtgaataggtaattaatgcggaaagtggcaagatttgatttaaacagaaggagccattagacaattaaatactaatttaaaggaattctcacattaagttcaataaaattaaacattaataatgaacaattaatacctttgtggagttatttagtcaatagggaactgtgctttttttgtttgttttgttttgttttgttttgtttgagacaaagtctcactcttgtcgcccaggctggagtacagtggtgcgatctcggctctctgcaacctccgcctcccgggttcaagcgattctcctgcctcagcctcccgagtagctgggattacaggcgcctgccaccacgcatggctaatttttgtatttttagtagagactgggtttcaccatgttggccaggctggtctcatactcctgatctcaggtgatccgcctgcctccgccctccaaagtgctgggattacaggcgtgagccacagtgcctggccgaggaatgttttatataatagtcccacttgtaggatatttgttagaaagagagtcacatgatacatttttatcactcttatctgctacttagagatttggcacctatagcaaggtgataaatacgccccaagggtgcaactggaaaatgtggttaacccgatgcaggagtctgagtggaactctgaacaggatgagacaagccggcagtgacctgttgagcccttggaccccagaatttctcgggttattgtttctccgaacagccactcagaagagattctttgagttgatgcaaaaatctcaaaacttactgtgtgactttgtggtagaaaagaaaaaatgcaatttggatccagattacaaacttgattgtgaaaaacaaaaacaaaaacagatagtccttatgattttggaatgatacagttaagggtggtgtaggagatcaaataaattatcctttaacatccagactataagattttgacttctacctacccaaagcacttgggtcagtatacgttttagtgcactgatgcatccacttgcccgtgtgaatgcattaaggacaggatatcgtattcttctaagcaaaaagattgcagcatactctacgcacagcactgggtagaaatcccactattccacttcgtagcaatgcgactttaaacatgttttcaaacctgtgtgagccttagttcatctgtctgtaaaatggtgataatagtagtactcacctcaaaggttgttgtaaggattacatgagtaaagtgaaagttttgatttaggggaaaagaggcagaacatgaagtactaatttaaagaaatattcaggtaaagcctatgagattaagtagtcacgaatggttaatacttccatgcagtgccatctaatagggcttcactatgatgatgcaaaggcatgagaatgatataatggactctggggactcaaggggaaggttgggaggggggtgagcggtaaaagactacatattaggtgtagtatatcctgcttaggtgatggctgtggtgcactaaaatctcagaaattaccactaaagaacctatccgtgtaaccaaaaccacctgtaccccaaaaactattgaaattaaataaataaataaatagggttcactgccaagcaaatagaaagcattctataaatgttaattatagaaagtgttctatttaagtgttaattattataataatcatgattgctggtgtggaattaagaaaaaggcaagggctgcatctttagaaatgctttaattcatgtaaagtgcttaaaacagtgcctgtgtgcatgtgtgcttcataaatgctagtcgttgttattataagagttactatgatcatgctagtgctcatccttacctgacttctggagtacccatcatattcaatattccaaaagataaacacaatactatttgttggatatttatcttttaaggcaactattaaaccattggaatggtgattttctgagagattcttcttttttaaaccattgacaactttattctgctattgagattttttttcagagccaacatttctttcatttataattctactttggaaatgcaaatgttatccatttttccaatgcatagtttcaacttactagttagctctgtaaatatcatttatgagactgacccatgttagatctttgctatggtctgtggtttgcaataattgtcattctcagttcccttaagtactaaataggagaaaagacagtagaatgttaaatcaggacaggggtctttggaggtcactctgtccagcatcctgattttttagataaggagacatgacttgtccagtgtcacctagcagctcagaggcaaatccaggacaacattcttaaaggtcatacattgaccctctgttaaataagtgaacacataagtatatccattaatttcagattgttttaagaataaaaatcaaagttatataaggttcctgaataaatctcatagcaggagggagaccatgtgataaaaccttcaaaaaaatggaatatattgtctggttgcttcctgaattgtacaggttactatttcatttctgaatatggcctcaaataaattgaaaagtacatcccttaaatccttgtcaagtgcaaggtctgtgtcataaatgctttcaatattgagggggaacaggacaaaaatttaaggaaaagaatttatgcaaaagattgaatcaatgctttttttggataagcaaagcaatctgtgtgataattctactttcctcctcccctttgtgaagctgggtgggggtgggaggattagcaagaagggaggggcctaatttatggcgagagtgagaactcttttcaagcctgtgggcagaaaacaccgctgcacctccctcccggctggaacctgctctctgtgatctgggactcctccgggtctctgtttgcctaattgcaacttgtgcttatgccctccagttctcactggcccctttgatgcttttcagcaagtcctctgaaagcagcaggacaaaatgggaaggtaagcaatcctttcacataaaagagggcagcaaaacccaggtggaggtccctgctgagatgctcccttccaaggctgtgaccacacagcctaagcaaacactgtgactagtgccagcaaatgaaatttacagccctcttaacctgcaagccacagccagcatctcactccactctccaaaataaattcaacgtggctattttagaaaacatacttatcccaggttttccttttgggcatctaaggactgaattagatggtctccatctctaactacatccccattctggagactttaaaaaaaaaaaattgctttgtttatttatgtgttcatctcatgtttatcagttcagcagttcacagtttttattctgttatataacaaaggagcctaacaaaggatcacaataggaaaaataatttaccccacatggttacaatgaagagaatttaattaaaggaattgttacaaagtgtgggcagcattgagggaactgacacaagatgttgagccactcaaagactagcaactggtggaagccgttactacccacttaggcctacctaaatgggcaatgggaagataatgttaatggagcccagtgagctctagagcctcggaggaagggcatcctgcagagatgttgttctcagtcttgtctactcattggaatatcagggaaacatactaacagctgggttccacgtcctagagattttgacgtaatgacttttttttgtggtcatcaagacacagtcatagaaagacacagtcactgactaagagacagtggcaaagctaggaacaaacaggaaagaaataccctgaccttcctctcctactctctgatatcctgctgatgcctccaattagaagccagactatgagggagctgggggaatgcactctgcatggatcaacctcctgtagtctatgtagtggggaaaatgggtgaataaccagcacagagctcacaataaaccccacaaacagcctctgtccctcccacacacaaccccaggaattagaaggaagggcagactggcactttctcattaaggtaactcactcatgccatcttggcattgagctgggcacttttaggtggaatgacctcccgaagggctaaccccatctggcacctcttgacaacgttccttcttaatatcagtggctctcctgctgctggccaagcaggaccccaaggtccactgggatgtacatacttatggtattatgctctgcaatacttgtgggggctgtggaatgcacacttccaaagtgaaataggacattggaggttttatatataaatatatatatatatatttatatatatatttatatatatatatttatatatatttatatatatttatatatatatttatatatatataaatatatataaatatataaatatatataaatatatatttatacataaatatataaatatataatatatataaatatatattatacataaatatataaatatatataaatatatataaatatatatttatacataaatatataaatatatatatatataaatatatataaatatatatttatatattaatatatataaatatattactatgtatatttatatatatttatataaatatatataaatatatgtaaatatatatataaaaatatatattaatatataaaaatatatatataaatatatataaatatatatataaatatatataaatatatatatataaatatatataaatatatatataaatatatataaatatatatataaatatatataaatatatatatataaatatatataaatatatatataaatatatataaatatatatataaatataaatatatataaatatataaaaatatatatataaatataaatatatataaatatatatgtataaatatatatataaatataaatatatataaatatatatatataaatatatatataaatatatatatataaatatatatataaatatatataaatatatatataaatatatataaatatatatatatatatttttttttaatagagaggatgaagaccaaagcagtgagttccacctaagctggcccttgccttttgtctaacaggaaacccagtccttcctaatgggcacagaattttcagagaagagagcagaagttgagttggcatacctactgtagtgagggattttgaacaatgagctgtacattcctatatgggagccaaacttttagttaaatagtaatacaaaaatgctgatgtggatgccacggcttcctcctttcacacagaagatgggcagtgactacacatttaggttcaccttgcatgaagccacgctatagtttctaataaggtattattagtattcactagccattctccaagggttggcttcaaatgagatcagtaaagcagaagcaaatcacccacgggttctttcacagtttctttcaccctaagcctctcatttcactagacaactgtaggaagaaaaacgagatccctgaagggcagcaacttttcataaactgcacttgcagttttgccaatgcacatatctgtgggctcattgcacaggcagcgcttatatctatgggcacatttcacattgtagatttcttgtcctttctgattttctccccgatcacactgatacaggccacttccagtgcctctgtaaagctccaaggggtaaaggagggcaggggtgaggagtaaaggaacgattcttacaggtgttgtgaacacgactattttatatcaaatgcttctaattgaatagtttaacttaaaaacatgtatcacaaatacagtttgaccaactgtaacaatatcaaagcatattgaacaggaagtgaaagtctttgggtgtggatagagatttccagaaaaatatagttacataaatgtgagtttccaaattgtaaagaagaaaaaagacatatctggcttaatatatataacattaatatcatgcatagagattctattaataacatttgtcagccactattgctaagagctttacatccattttatcctcacatcaatactattaaagaggaactattattatcttcatacgatagatgaaaaaacaaaggctgtaagagtttaagaaacttgtccaaaatcatgtagctagaaagcggccaagccaggattcagaccttggttaacccacttacaaactctaaactcacttctccattgttaaacttgactagtgcattggcttacaatgaagtttgccatattcttccctcaaatctgtatttttaataagttgctaggtgatttttatggtcaggagaagtggggccatactacatgatgtaggctatttcctgagtatagataatttctttcttttcccttaggtgtccattttctaaaatgtggatgagaacactctctatgtgtcctgcaaaatttaaaaagtttccattttaaaatatgttttataaatactaaataacatgtccttttcttgctgcctaagacatgattattggtatgaaaatgctatgagaagtcctatagtaaagacatttttgtccagagaatctgacttttgtctttctccagagaaagcaacctgacttttgtcttttaccaaataatatctgtttgtgtatccttcagttgtgccctttggagagggctatttctccatgtaacttcatgcagttacaagtcctatgatagctttatatggatttataaatcagtaaatttttttatactgtaaaactttaattttaagatttcaatgtttttattcattttgaacatatagggtaataatatcttctgaagccaggcaaatctactattaaattttgctttctataaaaacatagttgttagataactaatactgtgcgaacaaatttcttttccctatagagaaatagtgagtgttgaaccgacggaccttgtctttagaataaaaagacttataaacacttgtaggccagctccatgagaatatgccagctggaggaattttagtgcttctaaagataactgagaaagcagtggctctgaaggttacctttttctgctaatggatgtttagatctaaaatcccagtttgctttaaaaaaaacagtagtatgttaagaaggtttctagacctgtgctatcagtgtcaatgtaagtcttataagttccctatgagaatgttaaatcacaagggcttagggtatataggagttaagtgatgctttcagttgatgttgaatttcatggtgactccagagtcacataatataggagcttccaagcttgacaaattgctcatatatacgtaggcagaagtggctgatcactacagtgctggtcctgggcctgtttggtttgtgtccattcttgtctttcccctactatgctgtatcacaggggaacatacctcccacaggctgcatttcccagcctcccatgtctgactgctaacagttgggtcaatggtaggcattgtcaggagattagagggcagaagaaaggagaagccagggaatttctgccttggcaacgtctctgcctccatgatgctatctcctgccagagaagcctaccaaggttccagcttactccatgtaaccctggtccctgtgctctggtgatgctacctcttctgtgtgccctttgtggtttcctgcctttggtaatccctaggttgactcactgctacttatttggcttttttttttctctcctattacctataaaccaacaccctgtgttaaattcccttaagttactcattggtttgtgttctcctggttgaaccctgattaatgaaatttccatttaaataccaaacgtttcctggagttcgttattctagtggaataacaaacaaccagctccatgaattgatggcttttcagaatttattgtctccacaatatttgtttcaaatcctcttttaataatcactattttaaaacttaattactactactattgataataataaatgtacccttaaatgtattatataccagatttggatttgcatctgtgtgtcatatgctcttagttcaactctttctttattgctcacctgaaataaagcttcttttgccagttctatttaattaaagattatcctgtgatgagaatgcaagcctaggttctgccttgatttatatggcactgctttttcttcaaacactaagtgatttgtagcaagttctcaaaaagatgtgcttgcaactttcattttctaaggaactggaaggcagccataattttctctttgaaagttccacctctgttagagtatgtatagaggtcaagttccaaaaatagcttcataatgtctgactcccctttaatgcagtttgattaatctttgtgtaggattcctggcaaatgataggcacaaaatgactatatatgaaatgaataaatgaatgaacaaataagtgaatatagcaactgtctctccatagttatgcatacaattagctattttttgactcaaaattaaccaggaaaaacttaagttatccttccacaaggtgaacttaactggatgtgtcttggtttgaaataccagcaaccagctgcatactgtaggagctatcagagcaaaactcaggtgttgacactaaagattaatgaaccacctttagttaattgatcacatccaaagtgcactcccttcagccttttgtctgtcagttggcagagggtccagcaggtagacacactccattgctcactgaaattaaaatttaggtaatttaaccttctcaatgctatagatgatgatttttttaagttgcagtggaaacaacagagcaatttctgggtgagtaggtcttcttggtgattcataatttagtagatgacatgttcaaatttattaagttggcctgagcataaaattgtccaggagaacaacagttaatctacaatgctgcagaggtatctttcaggaacaatacaatccccactactattacatattgggctttttaattttaggcttgcaggtaaagagtgagcttttcagtgtttgcttttcaatgatatacacgtgcaggagtaacaattctagtttttgaatgtgggtaggaaggcatgcctgagtgtttatccggggagtaagcaattttgtacatagaatgtaagttggataaatatgcatttgctttaggttaaggtgttaatgcaaccttgtcaagaagaataaatctgaaaagtggttaaatcaaagctatttgattttaaagaataaaagtaccatctttcaaacgatattatctttgtctaacagtaattttcccccctgcctgtaatttcagagctctgtgatgtggaagctgtcaatgttacgtaactgagagcaatctgacttctgtcattgtgtgcattcctcaaggatcgtgtttaggtggccctacttgatgcttttctaaaaagccccattctacttctaagtaaatactgagttcctggagaaacctgatgaaagaaggcataattttgatagctgctttgtaaatagtaggaataagtatgtggcattattttctttgagggagaagaaactttttatttgggtgcgattcatatgagaacatacttactgtagattttgaaccttgatactggcagtgtggattggcctgtaaattgatgcttttgtttctggctgaggaactgcaaatatgccaggtgacattctctttgaagtgtaaatgttgtttcagttgaattttttttctagtacacttggaaagtgagtttcatgcctatgaaagagtctggattctaataaacattattcctagacacaggaaagttgctataagcgatgggattttgaattctacatggattcctgtttaacaggtgacttcacaccttaaccttgaccagccttctatctacatctgccatgttgatttcttttgtatattcatttcttgttacttccagcggtaattacatttctaggatatattggtgtattttggttgtctccaagtccccttggattctgaggccaccattgtcctttctagacaaatggaatggcttaagcctccacacagtgcactttgggaggtcctggattgtacttgacatttccaaggtgtctaaaaagtctgatattgtggtgtcacctctttctccaaattcctgctcccagtttcatctttaatgaccgatggtcactttctgccctatcttgcaccatctgcctttaagacacccctaaggcttatacctcaatcacaactgatttttcctcaaagttcagtgaaggagagggcaatagagtgaagaatttgttgctgtcatccaaatataaaacaggaaacacattatattttaatataaaagcattattcctagaaacatattagccattctctgccaaaaggacattatcactgaccttatactttattaggcccccaaacccaaccatcttgagagggttccatctctctcccatatctttttcttttttctttctttctttttttttttaagagacaagttctctctttattgcccaggctggaatacagtggtgcaatcatggttcactgcagccttgaactccttggttcaagggatcctcctgcctcagccttttgagtagctgggactgcaggtgtgtgccaccacacctggctaatgtttcttattttttgtggagacagaatctcaaactctggagctcaaatgattctctcaccttggcctcccaaagtgctgggattacagacatgagccaccatgcctggcctcccatgtctcctgttccagattctagttccatactattggccactacaataagaaaatccttgttattttattaagcagatgacttgagctttcaaattctattccagcctagagtctagggcccaactttgcatactggactagaatcattaaggtgttttcccttttcccaaatgcaaatgtctttactttcacaaatggatcctcagtaccatcagaaaatttgaaattgctgtgttttcctttcaacatattacagatcacattctgatagctcctcctcaactcaataaagtaaacatcatggttacaggcagtgtgtgggtggtattggtatgtcgaaagtgggtgcagaatgagactgtatgtattgccatattgaactggagaagcaaaatatgttaaagcacctggatatctttctttgcatatctctcctgtggttcttggtcaaggactatcgttgatacaggaccagctatgtaagccggagggcacagtgcaaaattaaaatgtggggcccttgttcacaaattatcaggaactccaaaagatcacaacagagcactaaaaggtcacaacagagcaccaaaccttgagtggccctttctaagcacaggtcctgtgcaatagcacaggtcacatacccgtgaagccagtcctgtgttgatggttgttgttgagtgagattttaatacatgtatatttatagtctgagatgcatttgactgccacctttggagaaaatatgtgctagagtagaaaaaataatttgaatggcagtaacaaaagattggttgccttgagaagaacattcttttgtatccgttagagtttcatcagagaaacagaaacttctctagagtttaagttggaaggggttttatatatcaatgaagtatttctaaaactgttggaagtgttagaggatcaaagctcaaggaaagccgtcattagctttcagagaccctggaaagtgtaggaaacccacaaaatcattagtgatgtccaggcttcctgcagtgctgtgaaaggtgattttcaccaaagccgtggcgctgcctattcctgcacaggagcaatgggttgctgtcaacctctctccctctttctttatcttgcataaatcttcttgttgatgaaatttaaaatggtaaataagcatttaaggggatctgactgctacagctagatgggaaagccaaaccccttttctcaacaaggaataatttgaagaaattggattcttcattgttggtaaagtagtatctgccatttgcataaatatctaaattgtagagagcagccattattagttaaagtaaatgctacatgctataatagataaacactaaaatctcaatagcttaatacaatgagattttatgtctcgttcacctcaaatttaaagagcagctgggaagacggcagtaactgcaccatacaaccattcaggaaccagggctcatggaggctctgctattttttaagcttttattttagttcaggggtacatgtgcaagtttgtcatataggtagacttgtatcatgggagtttgctgtacagattattttgtcacccaggtattaagcctagtgcccattggtgatttttcctgatctctttctcttctcacactctaccctccgatatgccacagtgtgtgttgtttctctctttgtgtccatgtattctcatcatttagctcccacttataagtgagaatatgtggtatttattttctgttcctgtgttagtttgctaaggataatggcctccagctccatccatgtctctgcaaagaaaatggtctcatttctttatggctgcatagtattccatggtgtatatatgacacattatccagtctatcattgatgggtatctaggttgattctgtatctttgctatcatgaatagtgctacaatgaacatatgcatgcatgtgtctttatgatagaatgatttgtattcctttgggtatataaccagtaatagcactgctgagtcaaagggaatttctgtctttaagtcttcgaggaatccccactctgtcttccacagtggttgaactaatttacacttccactaacagtgtacaagtcttcctttttctcctcaacctcaccaggacctattattttttttttgactttttaataatgtccatcctgactggcatgagatgtatcttattgtggttttaatttgcatttccataatgatcagtgatgttgaggtttttttcatatgattgctggccatgtgtatgctttcttttgaaaagtgtctgttcatgtccttgcccactttttaatggggttgtttcgtttatttcttgtaaatgtatttaagttccttatagatgctggatattagacctttgtgagatgcatagttagcaaaaatgtcctcccatactgtaggttgtctgttcactttgttgatagattcctttgctgtgcagaagctctttagtttaattagatcacatttgtcaatttttgcttttgttgcaattgcttttagtgtcttcatcatgaaatctttgcccattcctatgtcctgaatggtactggtatacttgaaagagatagggggaatggaaccaacttggaaaacatatttcaatagatcaaccatgagaatttccccaacctagctaggaaggccaacaaattcaggaaatgtagagaaccccagtaagatacttcacaagaacatcatctccaaaacacataatcatcagcttctccaaggcagaaatgaaagaaaaaaatgttaaaggcagctaaagagaaaggttaggtcacctataaagggaagcccattagactaacagtggaccgctcggctgaaactcagcatacaagccagaagagattgagggccaatatttaacgttcttgaataaaagaaattccaacccaggatttcatatatggccaaactcaacttcataattgaaggagaaataagatccttttcagacaagtaaatgctaagggaattcagtgtcaccagacctaccttacaggagctcctgaaggaagcactaaatatggaaaggaaagactattattagccattacaaaaacacactgaagtacacaggccagtgacataataaaatgaccacataaacaagtctgaaaaataaccagctaacaacataatgacaggatcaaatatatacatgtgaatactaaccttgaatataagtgggctaaataccccaaatgaaaagccacagagtgtcaatctggataaagaaagaagatcatagatatgctatcttcaagagacccatctcacatgcagtgacacaaacgggttcaaaataaaaggatggagaaaaatctaccaagcaaatggaaaacagaaaaaagctggagttataatcccagtttctgacaaaatggactttaaaccaacaaagattaaaaaagaccaagaagggcattacataatggtaaagggttcaattcaggaagaagatctaactatgctaaatatatatgcacccgacacagtagcacccagattcataaagcaagttcttagagaccacagagatacttagagtcccacgcagtaatattgtgagactttagcactccactgacaatattcgacagatcactgagacaaaattaacaaagatattcagatctgaactcattactggatcaaatgaacctgatagacatctacagaactctccactctgccattttcaactcatggtttctgcagttgttgtgagcattgacactagttggcagaaagggaaagagggagagtggaggattttatggcaaatttttatgggctaaacctcagagtggcacttgtcactttttcccacattgctattgccaagttctggtcatatgaccccttctaattgcagaggaggctaggaaaattagctacgtgctcaggagggaaaaaaagggtaaacagctagacagtttctctcacatgatgtctgacagggatccaggttgcccttctaccatttcagtaatcagagagtcatcattcacgaggggaaaatggctagtggtatgaatagcttttggtattttattaaacctctttgcttctaagtttctagatctgtaaaatgagggtaagtgcatcttataggataattttgaggattttagatttgacacaagtaaaatggtttagtgtaatacctgaaaattagcaaaaaatataggaatattacccattatcattattattttcatcactaagtgacttagtttgttttcacactgtggtaaagaactgtccgagaactgggtaatttataaaggaaaggggtttaactgactcacagttcagtatggctggggaggcctcagggaacttacaatcatggctgaaggggaaggggaagcaaggtaccttctttacaaggcagcaggaaggagaatgaatgcaggaggaactaccaaacacttatgaagctatcagatctcctgagaactcactcactatcatgagaacagcataggggaaactgcccccaagattcagttacctcaacctggtctcccccttgacacatgaagaatatggagattacaattcaagatgagatttaggtgggaacacaaagcctgacaatatcacaaaaactctaagaaagggtagcatatttggaaataagttaatatatcaaatgtgctcaacgcatgcacagaatgtagtaaaagttcaatacatgtttttatcatctaaacttattgagtcttcctggtattatacttacatttattattatgactttctactcataagaacccctcagataaatttcattttcttttattaggtttctttttagaatattgtctgtctgcaactacagtcacttggatacatcactaggtttacatgtgttttaagtcgacttttgctagatgtagcttgatctttgaggctctgtgtaggcctttataaattgcccttcatttgtttattgagaattgaaatgaaaatggaatgctccagactcagatgatgggatttgaggtggaaaatctcattaatgcataaacatgtaaataaatcagttgtttctaaaaatttattcagggccgggtgcaatggctcacacctgtaatctcagcactttgggaagccgagacaggcagatcacctgaggtcaggagttcaagaccagcctggctaacataaaccctgtccctactaaaaatacaaaaattagccaggtgtggtggcgggcctctctaatcccagctactcaggaggctgatgcaggagaatcgcttgaacccaggaggcaggggttgcagtgagctgagactgcgccattgcactccagcctgggcaccaagaacaaaactctgtctcaaaataaataagtaaataaaaataaaataataaaatacaaatttattcaggatagcatattaaacattgattgatgttggtactttaacagataagaactattttaattttgtgttcaattgagtcaaccctaatttgtttagaaacttctggaattgaatgcaatctgttaaaagtaaagacgtgttaggccagataataatattgctttaagcttgcctatctctaacacttattaggagaatatatttatatctgtctttttaaagtaagtattgaaacagctttgtttaattctcttttggtaagaaagatttctttcataacatttgcataatttttaaaaaaataattgtacaaaaatcacagaaccagtaaagaaatatctgtgacttgagggtctcaggaaggcagtatcaaatggagattcatttatttatttatttatttatttatttatttattgaggtgctgtccttttttaagagtgtatttgttcctctttttgtaaactgcagacaacttgaactgatggtgaggtctggtaagaaaaaaaaaaaaaaaaattcaaagctaccaagggagaaaaggtgaatttcattggattactaaattcacaaacaaactttataggtcatcattgaacattttatttatattagaataagcaagcattgagcaagatagaaataattttgcttcaggttatcatcattgtgaactatcacaaggtataagcacagaaatgacagaagttctggcacagaacaaggaatttgcacatggtccaataacatgaacaaaaaaggttgtatttatttatttatttatttatttatttatttatttatttatttatttttgagacagagtctcactctgtttcccaggctggagtgcagtggtgcaatcttggctcactgcagcctccacctcctgggttcagatgatcctcatgcctcagccttctgagtagctgggattacaggtgtgcgccacaacccctggctaatttttgtatttttagtagagacagggtttcaccatgttgaccaggctggtctcaaactcctggcctcatatgatctgcctgccttggcctcccaaagtgctgggattgcaggcatgagccgctgcacctggccaaagtttcatatttcttgtgatgacactgaatttttagacaaaagagatatattgactttgtgtgttgatggtttcaatttagaaaagactatttgggctgggcgcagtggctcatgcctgtaatcctagcactttgggaggctgaggtgggcggatcacgaggtcaggagttcgagaccagcctagccaacatagtgaaaccccatctctactaaaaatacaaaaattagccaggcgtggtggcacgtgcctgtagttccaactacttgggaggctgtggcaggagaatagctttaacccaggaggtagaagatgcagtgagcccagactgtgccattgcactccagccttctagtctgggggacagagtgagactctgtctcaaaaaagactatttgggaatttgttcatcaaaatttatgcatccactttattttctcaaagttcctcttactggaaagcatttaagtattttgattctttttaaaaataatttcaacttttattttagatttggggggttcgttacatgggcatattgtgtgatgctgaggtttggggtacatattatcccatcacccaagtagtgagcttagtacccaataggtagtttttcagcctttactcttctttttctcccctctctagtggtcccaatgtctattatttccatctttatgtccatgtgtgcccagtgtttggctcacacttataagttggaacatgcagtattttgttttctgttcttgtgttcattcacttaggataatgacctctagttgcatccatgttgctaaaaaggatataattttattctttttcatggaggtatagtattccatgatgtatatttaccacgttttgtttattcagtcatctattgatggccacgtagatggattccatgtctttgctattgtgaatagaactatggtgaactttttggtataacaattattgtcctctggttatatatccagtattgggattgctgggtcaaattgtagttctgttttaaattatttgagaaatttttaaactgctttctacagtttagaaattgatctaatttacactcccaccaacaaagtataagcattctcttttctccacagcctcaccaacttctgttctgttttgacattttagtaatagtcattctgactggtgtgaaatggtatctcactgtggttttgatttgcatttctgtaataattagtgagggtgatctttttttcatattttttggctgctttatgtcttcttttgagaaatgtctgttcatgtcctcgtttcactttttaatagggttgttttttgcctgttcagttgtttaagttacttatagattgtggatattaagtttttgtttaatgcatactttgtgaatattttctcccattctgtaggttgtctgtttactctgttgatagcctcttttgttgtgcagaggtctttagtttaattaggtcccacttgtcaatttttgttttagtagcaattgcttttgaggacttagtcatgaattctttgccaaagccaatattcagaatggtattaccaaggttttcttctaggacttatagtttgaggtcttacacttaaatctttaatccatcttgagttactttttgtatatgatgaaaggtgggagtctagtttcattcttgtgcatatggctagccacttatcccagcaccatttattcggtagggaatcctttctcttaatggtttttgtcaactttgttgtatgtcaaatggttgtaggtgtgtggctgtgtttctgggttgtctgttttgtttcactggcctatgcatctgtttttgtaccagtaccatgctgttttggttactgtggtcttacaatatacttaaaagtcaggtaatgtgatgcctctgactttgttctttttgcttaggattgctttggctattcaggctcctttttggttttgtaagaattttagaatcagtttttctaattctgtgaaaaatgatgttgataatttgttaggaatagcagtgactgtgtttgggcagaatggccattttaaggatatatactcttccaatccatgagcatggaatgtttttccatctgtttgtgtcatctgtgattactttcagcaggcttttgtagttctccttgtagggatctttcacattttggttagctattttcctaggtattttatttttcaggtggctattttaagtaggattacattcttgatttggctctcaggttgaatattattagtgtgtagaaatgctactgatttttgtgcattgattttatatcctgaaactttgctaaagtcattgttcaattctaggagacttttggtggtgtttttagtgttttctaggtatagaatcttacatcagtgaagagagacattttgacttttttttcctatttggatgccttttatttctttctcttccctgatagctctggctaggactttcaatactatgttgaataggagtggtgagagagggcatccttgtcttgttcctcttcttaaggggaatgcttccagcttttgcccatttagtgtgacattggctgtgggtttgtcatagatggctcttgttattttggggtatgttccttcaatgcctagtttcttgaggtttttttgttttgttttgttttgttttatcgtgaagggatgttggattctattgaaagctatttttgcatctattgagaggatcatatggtttttgtttttagttctgtttgtgtggtgaatcacatttattcatttgcatatgttgtaccaccctttcctccctggaataaagcccatttgatcatggtgaattaacttttctgtatgctgctggattcagtttgctagcattttgatgaggatttttgtgtctacgttcatcagggatattggcttgtcgttttcttttctcactgtgtctttgccagaatttggtatcagagtgatgctggctccatagaaggagttagggaagagtcccttttcctcaagtttttagaatagttacactggctcttcttttgtacacaactttataaacatacctgtaagcgtaattttgcaaagatctttcattcatcaaagagaattcctttgtgaagtaaaatggtaaatagtctaagcatcttgctttcaacttgactcagagccaaatgtgtgtaagcattgagagggtttgccattttacattccttagtctgaagaagggaagaaagagaacatccttaaaccctaaaaatattacttggcctgtatggcatttgtacgcaaaggtagaatctgagaccttgcataagatttactggaaatgctacatctccatgaaagactacatcaagagtgtcaaagcatgattagttggggcacattcatatttttttgttagggagtctatgtcctctcttttatgtattgtttgacgtcagatgcctttaaagtaaaactataagaattattagtcatttgatgagaagtaataaatgttatatagagaaacattacaaaatagagatagactcaggataggggaccatagagcatacaaccatgaacacatatcatttgcttaaattagttaaaacacaaaagcaaaatatttgaaatagtcaaaagaacattttcaattctacctaataatttattggatgaattcttttatttttttaaatagtttactggccgagttgataatatgatctatcctagttattaaccagcagaattttaatttagttttcaaggttctccatggtctaaactcaacatgcccttccaggctcaaattacactcttccagttcaaaggcccatctgaaatgggctgcttctattatgttgcccaggctttcttatctctagctctttgccctgatacctttgtctttctacttggagtacctattctttccatctttaataccccaccttcattaaatgaccctttctaattacttcctgcatgcttcagccagatgtaatctcttctctctgattatcacataacactattttgtgcttctgtggttttcaccttactcatctctgttgtactgacaaatggactgtgagctccgtattttttatcttcacccttatgcattgcgtaattaaaaccttgtacacagtacaggttcagcaaacacacactgaataaattaataagtaggtgaatagttttgttgtttacattcactaacaacccattctgattcatgtttacatggacagaaaaagaatgagttgattattaactaaatttaatgtatgtcatctgtatacctaaattctttgggttaatattaaaaaagtattcttccaagttagcatgaatttgacctatcttttagagtgttcagattggttcactcatgttgacattagtcagttttgaaattcagacataaaggtatacacatatagatttgacatttgagattaacttacttttttccagttagattatggaagagataaacaatgactcagaggaaaatggagaggctatagaggtgaaatactgtaataatgtggctaaacttgcttgagagaagatgagacataagcctgctttgttagtcctttcatagagaaatgactcagcactgttagagaatatgatgaggttacattgttctttcatcacaaactgttgagttaatggtggcatatatagagtatagctctgattcataagacaattggtcattgtgcttctctctttttattttttaaagcaaattagtgctttaaaagagcatagtaatctggttcttttcatgaaaactgatgattaaaaacaaactacgaaaataattttaaatacacctgggtttccaaatggacagaggttgttgaaagtcatttttaagttccttcaaagctacaaagtctatgtgtttctcaaattatcttttgcaaatcttagtaggaattaaacttgtgcaaatccaacccctggctctttttagcctcgtgagagcagagtatgcatcgtgctttcgttttggatgagaaatatacaaactgtgtgttgactggtggaaagcagaacaatggatctcagcaaattgtatcatgcccagctctgacttgagacgcagaatcaattcattttcagtgtcatgacaggatctgagatagaagtgagtctcttgttgccatcatgagaaaagatacgtatgtccacagttttggggagagggagcatgggagctgggtgcttcactgccaacacagcctctgatcacctgatatgttacaaaatcaattttatcttctgctgcatttcatgtgacaattcaaagagcaacatttgtttttctactctttacattctcaacttccatggaggcataattgccatgagttaaagctaggaggagagtgatcactgcacactgatttggatataaaatctatggccatttgaaagggaaaccttcaagagcccacgtaataaatccccgaggaacttaagagagatgaactgtacctaattgcatctgacatggctaaaacacagggacctctctaaagagtgtgagggcaggtccccaaatcctctgctcagcactattcaaggttcagaagaattcatgcatttagcttatctacagctatgtggcaaaacacccttcagctgcagtcagcctccctctaatgaccaatgaggagaggccaaaaattaaagttgtataatcagagattttaaagacaaactgaaaagaactggtggaaccgtctaacttatgccttggaatggcatgcattattttgtatatgattttgggcctcagaacacaaacacaactccctccacaaaggggatgagtttgctgggccagagtggcctcttgttgctgggagctactgccgcccagcgtgggcagctgcaatcacagtgcccctatccctgcctgagtggtcctggagggttggagagctgcgtgactcctcaagacctttgtcactagcctgtgtaatgcctgtgcatgagtccttgaaagcaaatcccccaattagggcctacatggcctaccctgaggagggaagaggtgcaatacatgttgcttttaacaattcttcatcaggaatgagaggatgttgcaatggaaaggaaaatattaattcctgctaggcccttgtcagtgggatcttctcccattctcttcctgctggaattacagatccataggttttggagccagtcagcctgggttctttcatgcattcccttcttctggtgggcttgaccatactagatatcaaatactgtgactcaaagttctaccacctctgttgacttaaaggtcaaacctagaacaagccttggtctctaggtctaagaggcaaaataaaagctggtgaaccttcttactgacaaggcacttgacttccctgtgcctcagacttcaaatctataaaacgagactcactgttcttatctctgaggtttattgcttggaattgaatggggtaattcataaattccctagcctggcaccccacacacggcctcttcaagaagtttcggggtagctctcttgccagtcagctgagaaaaccaagcagtgagaagagggtcatatattgacttggttttcatgctgacaggctttggcatctcctcaagcttgtccatactctacagtggcattaagagagtagtgtcctgcacttgtgtttgagcactgtggaacattcctcaggagttctggctgagatgcatgtgccccaccttttcccagaaccagggccctctaagtctaagtcaataaagggaccaggggaagttcctggaaattctgatccaattcaagtccctgctacctaggtttacctcttgcctggcctgtctccccctaatttctcaggagtagacttctatttgtatagtgtttatatgggccaacatttgcatatgttcacgcatgttatcttcacagcaattctaaaaagacaattaactcttgttatgtctgtttataaaagaggaaattgaggcacagaaatgtcaagtcacatgaacaaatccctacaggaaccatctttaataagtgtcaaagtaaggagtcaagctcaggcagtcatgcccttatcccacaaattttgagattctgccatagccaggtttatgccttgcttctcacttgtgatggactttccagagcttggcccagtcactgaaacatggcaaacattgtcaatatttgatgagtaaagacatgaatgaatgatgcttttgcaactatcccattccctgtgcactcactgaatttttcttcccctttttatcatcgcagtgtttgaaaattttacttccttattttactagatatatctttgtctttacatgtgtcatctctcaaccagatgtaaaaggtacttccctgaagggaagaagcatgttttatacctgttatgtaacctccgtaagaatagctgaatactcagtttgtgacacacaaaaaccctaaaataactatctaaatagattgggaagttgggttgttgagatacagaagatttactcttcttcccaactcatcccttctctttgctccttccaataaaatgctatttggttgaatagtttaaagatggaaaaccatttaaggttaaaacagatgaataagatcattctaaagaagcagaaaggcgttcagaccgttaagttgaatagatcagagtacggcattgattctggctgtaagatttcaggtcaccaaaggaaatatgttggattgcattatctccattttttttaaaaataaagtttagatcgctccctgaagataaaattactcttggaactatattcaagaaggacttaagtatgtagaccttatgtaacagatgtaagaaacaattccaccaatgctgatattatggagacaccaacatgccctcttacataagccataaaagtggtgagaatggccacatttttgtgatggggtgtttggaattaattcatcttcatgaaacagaggccacatcatattcttggtcatgagtaatgatggtaatactgtttctctttcctttgaatcacttacctatccattgacctaacatgttttaaataccacaaaggagtaagattctctctcatgtctttgggtagagaaatatgcaacaacccatttcctaaaaagtctgtaattacatgtgggaaatgctggtaattaatagcctgaatgggtgattctaagttagattcatgaaaaaccaagagacatatctaacctttcttaagctccagggcacatgcataatttgaacattatgtctacaatgtgggtgtattttcttccttttcaatgaagacagtgattaggatgataatagaaataatacttgggtttatagagcctttagctgaagtctacctacatggtttctggctctgtggtaagcatgtcggactaatgtcagcttttgaagtgaatttttcatgcctttttccctctgggcttcccctttctctaataaaactactttaatcccattcacattccagttctgaatactagcacttgaaatgaactgtctatatctgactcacttaaaaaaaaaagtagtttaaataaaaacaaagagttgtttactttcctttcctacctggctgcatctgtcacatgcatatagtgtcccctgacatgaagctctgatattgatctggagccttattgatctccaacttaatatagggacaatgtctaccaataacttaggcacttccagagaggctcactctgtcttcttttgttcacttacaaaatgaaaagaatgtctttactagagtacctattaaagggttccagtacaccctaccacaagctcaactttggaatctgataaaatattttttaagcaagcttctggttttgttatattaatttgggattggattccctccagtggttcaaacaaaatgaaagtatgatctttaagtatgtaatatattctgtcagttctctggttagtttggatcagaattaactcctttcaggatcatcccaaaataacagtgtaaccccatagtaaagcacactctcttctttcctgtgatatcccatggagtaggaataattaggcaaccacaactgcttaaccctgtgtggtttcacacagaaaaatcatgacaatttctcttcttgttgactctttctcatttttctggttatccatagcttttaacaacaaaccaccctaaaagttattggcttaaaacaattgcaattatttatttggttcacaaatctgcagtttgggcagggctcagcagaaaaggcttgactgtgctccaggtggtgtgagctgtggtggctcaagtgggctgaagtatctattttcaagatatcttaccaacatggctggtgctggctgtttcctgggaactctactgggtctgttgtatggggtcattgattctttggatccaagataccacagctagaaactgccactctttttcagtctggtacagcatcacttctgcgatattttgttggacaaagaagtcacaaattctgcccaaatttaagaggaagggacataggacctgtaaagcaaaataaaatgttaagcccccaaccaactaaatggatccccctcacaaccaagagcattccaaagttaacctgaaacatgagttcaggccatgatgggaatggatagtcagacatgcctcattataccatcctccctttggaattgaggcacaactgaccagcgttaatattgaaacagaaacgttaaaacaatctgttctctctgaagcctggaggcttcatctgtgtaataaaaaccttggtctccacaaccctttactttaacccagacactcccttctattcattccaggtatttatcaagagcccatctaattgccagtcagaaaatctttgaatccacctatgacctgaaagcactgatcccctactgacccaacttccatttgtcctgcctttccaggacatggaacatacatcttaatgtcaaaggcatgtccttaaccttggcaaagcaaacttctaaactgattgagaactgtctcagatactttttggtttacaaaccctacctgtcattgagaggagtgtcaaaaaattgggccatgtttatactacatgctctttaattaatatctgtctgatactactaatatctgatactatagttacccaagccagaaactcagtcatcacctttgaccctttcttctctcttatctttctcttcttgacccaccctagaaatacatgtaatctttattgcatataattaataattctgtgacttaatcagatattattgtatcatatacataaataccaattacaaagtcttctaattgaccctagaatcttctgcttctcttgagtgccatcacctctactctggtacacacatcatccctcctctacctactagccagtctctctgcctccagccttacccctttttactctagtcatgatgattttatttttagttagaaagaataactgtcctctgattataatttctcaaacatcctctattgctgtaagagtaaagtgcaaatttgtttgcctggcttccaaggccctgcaggatggggtcccagcctccttcactagccacaccttgttatctcctattgaacctttggcccttagccttcagctttaccaaaatcttgatgtactccaaatctcttcctttgaaatgctctttcctgttcctcttccttcttaccatcctccattccctttgctgggataattcagtcgcattctttagatttcaagttagttttcaattgctcacttcctctgggaagaattttatgacccttcattcatttattcattcacagagtattcattgagtatctacaatgtgccaggcactgttccaggccctggagatactacagtgagcaaaataaataaaagagccttttgtcatgggatttatccttctcatggaaaagtcaggcaataaacaagaaaataggtaaattacatagtatgttagataatgataacagctgagcacaaataaatgtgaagcaggatgggcaatataaaatgttggagggtggggatgttgcagttttggcaaaatccaggtaaggccccactgggcaggtgtcataaagtcaaggcttgattgaagtgaggggtctagctatgaggctgtctgggagaatactattccagatagaggaaacagcaagtgcaaaggccctgagataggtatgggccactgtgtttaaggcgtggaagggccagagtggctggagtgaactaagaggaaagcagaagaagagaagatgaggtcagataggtgatggagccctgctcgcagaaagtcctgttggttgctgtaaggactttggctttggtcataagtaaggtgggaaggaagcattgggaaagtttgagaagaggagtgacctgctctggtttatcatttaagggatccccttcacatcccaaatcctcccacattagccccttctcccatcatttagctttttacctgtgctataacttggttctatcccttactagtatctcatttctgggaggagaggactctgtccaacttgttagtgttttattccctccatctagcccaatgtccaggaaccatagggtatcaataagtatgattgcattgaaataatgagtaaatgaaagccagctcccgtgctaatctttaactttttaattactacaacttctttatattggttgtagtaaacccaaaatacaaatgaggaaatgaagtaagaacagaaagtgacagagagagaaaatgggaagagaagaaataaaattcttggagccatcatggcagccttctttaagctaagaaacccaggttctcattccgacattggcgtctctagtggggaattttagggctgtctgtgggaccacaagatgatcatacacttctctgaaaataaatgttcatagtgaatgcttttttgatttttggcagaggatgggaggcacttccattttggcccattatgagaataacaagacaaaatagccatatcatagtatatttattacaaaaattcatgtcctacctggctgtatgtgtgcatacatgtgtgcatgtgtgtctgcaaaggcttcatactagtccacatgtatttatcagtgtggactctatgctgaactaatgctagggatggagatgtcctgccctcaatggactcaacaggggctacacaaatcaagagcggtatagtgagtaatatggtgaggaaataaatacctcttctaagaagcaaatagacttgaatatattagatagaaaaatatactaatgcctgcactgaatatgtgattagctttttttgtttttttttttttttgactgtctcactctgtaacccaggctcaagtgcagtggcatgatgtcggctcagtgcaacctctgcctctaagggtcaagtgatcctcctgcctcagcctcctgggtagctgggagtacaggcacacccagctaattcttgtattttattttttgtggagacggcgtttcaccatgttgcccaggctggtctcaaactcctgtgttcaagcaatccatccacctcagcctcccagagtgctgagattacagatgtgagccaccgtggctggccatgttgagcatttcttgaaaaatagcagaaacaattgcttccttaccaaaatggtatttttcatttttggtttaatgggtaagactggagaaggagacacttggccactatttggagtatcacaattggacttgtctcgtgatgtcacaaaatattcaaactggaagaaaagcattaaaaaaaaaaaaaaacctgtgttcagctcttttgtttaaactataaagaaaaatgtggcccaaagagactgggtgttgccaaaaattgcacataggaagaacagagagggaaaaccaggcctctgagcctgggaccagtcacatgatgacattttgttacctaagtcaaaaagagaatgacagtcttctccacaggagtactttgggattagttagtgggtggtctcattacccataagcccctgcctttattggttggttttttctcactccatctagacacgctgttatcagtcctggagcctgagtacactgtgatggcttcatgttgtcagctgcgttttctcatgccctacactgcagactgaaaaaggatgctccacagccagctttaacaccatgcaccaagcctgccacagccatcctctcttctgctccaagctgctgagagacaggaaatggaggttctgagttttgaggcttgcagggtttgtctgcactgcattcagcttgccagtccccaggagagctggcatgctgcttcagatccagaaagaaaaggagagtgccaatcagatatatacacttctgtaaatctccagttagttccagagctgtcatttgcctgtagaaattttaccacgtttacatgactgacccagacagcaagagctagtgatgcccctctgttgtaactacatggccagagggacatgcaacccaattaaataaaattaattttaagcacacatcctgatttggagaagcatttggacaataacatagtgtcagtgtgagtcacttatcctaaacagttttattgttgtgaccctgatttggacatcgctatggttgctgtgcatgataaacttgaaccatgttttgcgcttaagttttaaagaactgtaatttaaaacatgtataacaaaacaatctatgaataaatgagatctttccaaattagatatctcctttggtagcatgatgagtaattctttccagtatcataacattgagggtctctgagagtctccttattaaataataatccttcttcatagagggttttgcatgaattttgggagaaaagctatttacctacttaatcttaaacaaaaggcatcacttccctgctttctgtgtgatcactgctgcatgtgtttgcatgtgtaaactgtggtggctttacatcatcttatactatggatttttttccatatacagcagtatgaatagaaacaatttttgcagaatttcatgaattataactaaggctaaaagcatggatactgttttccatctcatgctgttatgttccttgccttattttgtttatgtaataaacatttattcagtgtatactactggccaaaggttgttgtaggcactgaggatatatcggtaaacaaaacaggagaagatctctgccctcatgaaacttatattttagcagggaggtaggggcaggtgatgcatgcaataagcaattatcataaatatttacataattaaaattacatagaatgcttgaaactaactacagctgtaaatggagaaaaaaaggagagcaaactaaaggggaagtggttaaatctaggattcaataagaaatagaggggtcaggaaagcccttattgagaagaagagattttagcaatgacttaaaagagataaaggaatgaaacaagcagatatgctggggaaagatcctatccggcataggaatcagctaaagtgaggaccgtaaggaggtaatcttcagccagggaagtcccaggagataattgtggataaatcaaatgagcagagggaagataaatgcagctagaaaaggtagctgtttagggtcagagaaagggctatgggcagattatgtagggccttggaggcagctgtaagacatctgggtttaattcgaagtgaattgggaagccagtgcagttgtttgagaaaaggaatggtgtgattcaatttaagtttctaaaagattaagctagtgaatcttttagccagagtaatctgtatggggaggatgacatggcatagcaaggaaagaaacagtagcctactgcaataatctgggagacagctggttgcctcagtcaagatggcagcttgcagtagaagtgataaaaggagtacagactttgtatatattttgaagatagaaccaacagggagaatttaagaatgactccaagggtttctgtctgagcaactggaaggatgtaatcgcttccagctgttatggaaatggaagcaggttttgttggggagaatgaagaatttaagtttgaacgtgtcaagtggaagatatataagtcaggagagagatctgggcaagagatacaacttgagagttgttggtaagtaggaggtatttcaagtcatgaggatagatgcaaactccaaaggagtgagtatagatagaaaagaggatggaggtctgagccttggtccattcccccagtaagaggtaagggatatggacaggaaccagagaaagaggctaagaagatatgaccagtgatggaggaagaaaaccaagagaagatgctatcttggtgaagaaagtactttgatgagggggagagcttcatggtgtcgaggtctgttgaaaggggctgggtgcagtggctcatgcctgtaattccagcaatttggaagaacaagataggagaatctcttgaggccagtagtttgtgaccagcctgggcaacatagtgagacccccatctctatttaaaaaatagccaggcatggtggcacattcctgtcatcccaattactcaggaggctgagataggaggattacgtgagcccagaagtttgaggttgccatgagctagggccactgcactccaggctacaaaataaggccctgtccaaaaacagaaaaaaaaaaataataaaaattaaaaaaaaaagaaagaaggaaagaaattctgttgaaaggtaaaaagctgaggactgagaatgacaaccagatttagcaacatggaggtcatgggtggattgctggcagcaatttgaatgtcatgatggaaatcaaatcctgactggacaaatagggatcttctttctctttttccttccttccttccttccttccttccttccttccttcctccctccctccctcccttcctaccttccttccttcctaccttccttttcctcctttccttcttcttcctcttccccttccttttctccttccttctttcctttttgtgccattgaactaaaaacccatacttggatattgttgacagtatgattttaatgaatccctttgggaatttttttaaactcttggaagattttcacttatttgatctgtccctaacattccaaaactggcatgaattttaattatcctgagatttcacttgggaataaaatggccaagataacagataagcactttagaaaatcattagcttattttaggccattacattatatcttcttacactgaatatgaggaaaaaagtattagtaacttattttatcatgtcttggtaattgaaagtaagtcacatattcttctcaaagtacatccagggtttacattgtctgttatgtatgcatggcttccctaacaagataataaattcttggaagataacaaccagaccttctatttttaataatatcttttgtgcccagccatgtcttgtacatagtcggtatgcaataaatatgtgttggtttcattttctatgctcattctgtctgatcctgccttcttatatacaagcctcattcagtaatgggaggatagtaatagaaaacagagggaacagtgctaatactgctagaacttgtaggctttgaagactttacaattttgttaggaagagaatagagatgtatttgagaaattcagtagcaaaaaaagaaccatatatagcaacaataaaagatgggctcatgattagtgaccaaatgaaatctgtaggtaatatatttttaaagggtcctgtgctggttggagaaacagacactgagaaaattattcttaaaatactctcctgtcctcccctctctcctcatcaataagatgaatatatgtttatagaaaaattagttaacattatattatgaaaaactttgactattcaatgattttaaacataatttccaatggatttagagtattctatcatgtgactgtatcataatctatttactctcctggattgaaggtttcgatagttgtcctttctttttcatgacataccaaactaagatgaacatcatttattgccatgtctttttgcatattcaatagttatttctttatattaaatttctaaatgtgggctggcatggtggctcacgcctataatcccagcactttgggaggccgaggcagatggatcacttgaggtcaggagttcgagaccagtctggccaacatggtgaaaccacatctctactaaaaattcaaaaaaaattagccgggcttggtggtgcacgcctgtaatcccagctactcaggaggctgagacacgagaatcacttaaacccaggaggtggaggtggcagtgacattgcactccagcctcggcaatagagtgagactccatctcaaaaaaacaaaaaatctaatgtagaattataatattaaaagattgacatacctggagaattgtttttaattgtggtgaaaacatacaatgtaacatttagcatcttaaccattttaaatggaagtttagtgatattaactatattcacgttgttatgcaatagatctctagaactttttcatatgtgaaactgaaactctgtctccattgaacaacaacttgccatttcccttccccttagctcctggtaaccacaattctttctggagtgcaatggcataatctcagctcactgcagcctctgcctcctgggctcaagtaattctcctgcctcagcctcgtgagtagctgggactacaggtgtatgccaccactccccgctaatttttgtatttttagtagagacgggattagaacatgttgccaaggctggtctggaactcttaggctcaagcaatcctcctgccttggcttcccaaagtgctgggattagagttttgagccaccacgcccagcccatgattctactttctgtttgtatgagtttgattactttagataccatttatgaggggaattatacaatagttaccttttgtgactggcttatttctcttagcataatgtcttcaaggtttagccatattatagagtgtgataggaattcttcttttttaaggctgaataatatatctctttgtatgtatataccacatattgtttatccatttatcttttgatgaacatttgggttacttccaccccttggttcttgtgaataatgctgtagtgaacatggatgtgcagatatctcttggagaccctgctatcaattcttttcattatacgcccagaagtggaattgctgggtcatatggtgattccatgtttaatttttttgaggaaatttaatactgtttttgatagtggctaacactattttacattcccaataacaatgtacatcttcactaacacttgttactttccgttttttgataatagccatcctaatgaatgtgatatgcatacacggctttaaaaaaacttgtttcttcagaatatttgcatatggagattagcatatattatttacctttaatattatatattttgtccttgcttatttgatagataaaaaataatttgtatttatttgactactagtaaaatttaatatttttaatacttggttactagccagtttatatttttcttttgtgatttgtaagttcataatctatacctcattttgtattgggttttctccacccttcttatttatttataagagctattaatataatacattatccttttatcttttatttatttatttttaagacagagcctcgctctgttgcccaggctggaatgcagtggcacaaacacagctctctatagccttgacctcctggactcaagcaatcctcttgcctcagcctcccaagtagctggtaccacaggcttgtaccaccatttctggcaaattattaaatttttatgtagagatagggactcaccatctcgcccaggctggtctcaaactcctcagctcaagcaatcctcttgccttgacttcctaaagtgctgaggttacaagcatgagccaccatgtctggctgttatttcatgtttttttacaaacattattttcatgtttcagatacatttcaactttgtttattgcaatttttgcttctataatactgatagaatcaaactgaaacttaagactattttatttctcatttacccctactttttttttgtttgttttgttttttgagatggagtctcactctgccgcccaggctggagtgcagtgacgtgatctcggctcactgcaagctctgcctcctgggttcacaccattctcctgcctcagcctcccgagtagctaggactacaggtgcccaccaccacgtccggctaatgtttttatatttttagtagagatggggtttcaccatgttagccaggatggtctcgatctcatgatccacccgcctcagcctcccaaagtgctgggattacaggcatgagccactgtgcctggcttttacctctacttttatatgaagaaaatccatgctcatgtaatagccaaatacagtcaaattcatttttctctagtgttaatatttcagtcaaattctaatgcattaggaatttgttaatattgcatttaatattatttttccccaatctttttttatttgaaaaatattataatccagtcaaatagcaaataacataacaaaatgagaatttcttaccaaggattaattcatattaacattttatcatattgatttcagatcttgtgtgtgtgtgatgtttactgataaattttgtgtccttgtacagcttttgtggatcagggacaaggggagcatgttgccgaacaaaaatatattaacatgtttgggactaatgcacactgattttcacagaaagtaactgattgattgcaatcaagtatgggagactagagggtggcaagagttttgataaaattcagttcaataaacttgtgaatttaagagcatagagattctattaacgagaatgaatagaagaagatttagacatggtgatttaaaggggatatcaagttagtgttgaagagtaaccatctcaggaaaacagtaggaattagagccagttctgagaatattctgtgtgagatctatggaaataaaaaagctaggaagggaaaagcttaaaggaatgtgtgttgggaagtgcttatagaagagagcaagcaaagtgccttcctgttgtcgtttagacttttccttaatctgcattcctgcagttaggtttactgagctctatggcctgagttattgctcttctatgtagttccagattaagggttaagaattctagtagagcaggagtatttctggaaaagatggttggggggcaagtatagggatggggagaagcggagggcttactctccacctcccaaaattttcatggaaatgacattcagtaaaagtaaatatccatataacaatggtggtggaaaggaaaatgtaggggtagatggcttttgcggatcaggaacaaagggtatcataatgctaaataaaaatatgttaacatgtattggactaaggcacactgatttccagatggtgtttacatctgaggaagaggaaatggggaaaaggtggggaggtagcctctttataagaatcttcaatgttttattaattaatatttctaaaagataactctttttgaaaagagaaaagataaaaatattatcatccattaaatgtgggtagtgattaacttattatctcaggttaggttcctttctagttgagatttttataattaaatttttagataagagtcagaaaatttaggataataaccttggatgacaaaggaagaaagttttaggatattttaaatattagtgaaattccaaataaatttaagctgagagctcactggttaccatatatgtttctctttaacacaagaaattggaaatgcgttaggtcaattcaacaagtaacatttggaaataggccgggtgctgtggctcacgcctataatcccagcactttgggaggccgaggcgggcagatcacgaggccaggagttcgagaccagcctggccaacatggtgaaaccccatttctactaaaaatacaaaaattagctgggcgtggtggtgggcgcctgtaataccagctactcaggaggctgaggcaggacaattgcttgaactttggaggcagaggttgcagtgagcagagattgcaccactgcacttcagcctgggcgacagagcgcaactctatctcaaaaaaataaataaataaaattaaaaaaaattggaaataacatatttgctattaatatcttaaaggaggtatttgtgttgaattctttgtcttagtcattatccttgcttttaaaaaaaatgttagaattcctttttctcaaaattctgaatgtgctgtgtttaacagcgtagttacagttctgaaagggtagtagatttctccccttgtctatttgtttgcagcaggtcatgaactcagaccttttctcttcagtgctttgcttctgaactacttattctgataccctcctcacctgaggaaacagagcctaagaaggttctccttatatggattcaggtagatgagtttccataaaaaaaaaaaaatgacatcaagcattgatctgcctgaataaagcaattctaccagttatatggcatttggtgcttcctgtgaattgatacaaacttcattaaagaaaatgacagatggcatatggctgcaggcaaaatgccagtccacatgatgaatcctaccatactctagtccagtataaacaatgtttttaatcaccttcaaaaaactgttgcattaatttgtctacagtaaccaggtaattataaatgtgtagctagttccttattatcttaaaaaaataaaaataaaagttagcaactaataggcatttagcttgagtttatattatagatggccaaaggagattttatggcccaaaatggacatggtgaggtctgcatgtgaacgatgttacagtagactaaccacagagcctggagttcctgcacttttcttgatttgtttggaatattactttgagaattggaaggcctggggtacgaaaaatgattataagatttttctttgtttgacaagataagcaggtctgtgtgaggcagatactttctatggactgactgcagacaggtttcagtcacagactcaggttttatggcattctctttgaaggtgggtgtctaatgtaactgaattttagggggataattacagtcttatcaaattctgagatgaacttcatcacttatttaaaaaaaatttcctgtcaattagttcttataataatatacttttctggtcaattttacatgcagaatttggtgaaataaagaaacataaatagataaaaaataaatattttaatgatgcccaaataaaatttagatgtgtaaggactaaaaatgatttttaaaatagttgtataatagaactacatcttagtttcagcacatggaatttatatagttcattttagttagtgcttcatttcaggctgctttttttcaaacaacagaaattgactttggctcatttaaatggaagaatgttttagaaagttattcactgatggggcagaaaggcagaagaaccaagcatgaatcaggttccataaagtttcaagctgctgtaacagaataccatagactaggtggcatataaaaaacaaatttatttcccaccattctggaggctgggaagtccaagaacaaggtgctgacatatttagtgtcagtgagggtgctcttcttcatagatggccgtcttctcattgtaccctcacatgcccaaagtggccaacacctctcttaagcttctttttaaaggcactaatccctttcatgagaagtctgccctcatgaaccaatcatctcccagagaccatacctcttaatagcatcatcttgggaggtaggatttcaacatatgaattttgaggggaaacaaacattcaactcatagcagataacaaggcagtaaaacaattagccaacactttataaaaatcttcaatgttttattaattaatatttttaaaagataactctttttgaaaagagaaaagataaaaatattatcatccattaaatgtgggtagtgattaacttattacctcaggttaggttcctttctagttgagatttttataattaaacaaatttctagataagagtcagaaaatttaggataataaccttggatgacaaaggaagaaagttttaggatattttaaatattagtgaaattccaaataaatttaagcttagagctcactggttaccatatatgtttctctttaacacaagaaattggaaaaaatgagttaggtcaattcaactaataacatttggaaataggccaggtgccgtggctcacgcgtataatcccagcactttgggaggccgaggcgggcagatcacgaggccaggagttcgagaccagcctggccaacatggtgaaaccccgtctctacaaaaattacaaaattatgaaaattaaaaaatttcaaaaaaatacaaaaattagctgggctatagtctgggtagggcatttggtactggtcccaactccactgggcactcttgcctgtgctggaattatcctactgccacagataatgtctcaactgtcctcacatctttgtaccattctccagagattcaacgttctaagcagaaacctttagctggctgagtttaggtgatgtaccagttctctaactgcctaatccattggcttctgaatgagaggtgaggccctccctcccaacaaataggaagtagtatcattgttggacaaccaaaggcaacgaccagatgggaactaataaagctgtatgacactaaaaattcttcattaaatcatgcctttttttctagtatttttctctttgtttttgatagccaaaaacatatgtagcaaataatgccattgtcaacatgactaactccaacacttagttatagttgttacttttcagcccatggtgttttctgctgtgacaaaggcagagttgttgttcctgaactgcacatctgcctccttttcttgtacacacttctgatattttcaagtttaggagaaagcaggcatttgccttacgtctcaactcatattttaaaatcagtgtcactttcctctgcttattttgctatgcttttttagtgaataaatatttaccgaagacttctgcattagtttgcccgggttgccataacaaagcaccacacactgagtggattaaacatcagaaatatagcgtctcacagttctgaagggtagaggcctgagatcaaggtgctgggtttgcttttttctgtgggccgtaaggaagaatttgttccatagctatcccctaccttttggtgggtttctggcaactttggcattgcttggtttgtagaagcatcactctgatcactgctttcatcctcacatgggggtctctttgtatgtgcctctgtgtccaaaatctgccttttttagaatggcatcagtcatattggactagggtttgccctaatgacctctgttaacttgattacttctgtaaagatcatatctccaaacaaggtcacattctgaagtaccggtgttggagtttcaacatatcttttttagggggaacacgattcaacccatagcagcttcttaaaaggcaacctctttaatgtgaagaatttgaaatattgactcatttctggaagaaacaaaaacaataacaacaacaaaccaaactttaagagtaaggaatatctaactgggcagtgttggttgtcaaatgagtattatacacataactaaatttcagggctcaaattgacatgatttctttgaggaaacttaaggaattactaaataacttttatcagtttgaagaggttctcttctattcctaaaaatattcctggttgaatattttcattatgaaaggctgctgtattttgtcaaatactttttctgcatctattgagatgagcatatggtttatatctttgattcttttaataatatatattacatgattacttttcatatgttgaaccaactttgaatttctggaatagctcccacttggtcatgattataattctttttaaaagctgctgggtttggtttactaggaaattggtggaagatcttttcacctatattcataggggatattagcctgtaattttcttttcttctgaaatttttgtctagttttagtatccgaataatactggcttcatagaatgagctcggaagtgtttcttcgtactctttattagaagaatgtgaggattagttgcaattcttcaaagtatttaatagtagaattcaccagtagaaaccatttaggtctgggcttttctttgcaggaaatatttttattacaagtcaatctctttgcttgttacagttttatttagactttctgtttcttcttgagtgagttcagtagtttgcgtctttctgagattttttttaaatttcttcttgcttatctaatttattggtctacaattagttatagtattcttgtaaaatcttttttgtttctgcgaggtcagtagtaatgtcccctctttaattatgattttagtaattgagccctttttttttctttgccagtcagctaaaggtttgtcaattttgttggtcctttcaaataacccatgtttggtttcattggttttctcttttgttattctattctctatttcatttgtttctgcttaagtttttattatttctcttattttgcttgctttgcatttatgttgctctttttctggtttctttcagattttctttgtggatgtgctctgaaatactagaaaattgaaaccaattctatttcccttcagcaaagcattaattattgtgaaatactaatgtaaagtcaatgtaatagcaactatttatttaaatgagtagatatactgcaagaaaacattttactgcatatatgaacataaccaaagggcatctttaaagacagaaactttaaatgccaaatgcatttttcatattttgagtttcatttcaagacatctgatggaagatagtattattctataataaaatattttaacttttacttatagtagatgcagtaaacactattgcagctttaaaaatacttattatagtacttagcattagacaaattgtttgaagttttaaaaaaatctttacaaattaaaagctatagagtgcctataatcctttaattcaaaacagttgttttcattttccaataaattggtaaaagggaacttaatgacattgtctttccactaaacatcctagctgttttcaagaaaacagaattaacaagaaacttaaaaaataatattgtaaagcagacagtattctaagtcattacagttaatacaacaacaaaaattcagtgtgaaactcttgaaacgaactttaggatatattcggttaaattatggtctactatttgtaatttcatgaatttttttccaagtattggaaatgatctaaatggctgtgtttgtgtcacaataatgttcaggttacaatatgctgtatatttaaaattacctttgcattttaaaaataactatttaaaacactgccaaaatcggcatcataattattttggaagacttaaaataaatacaccaaaaacaaaaccagaatttgcatctaattgcctggaatagtttctctagcctcatttgccagacagaggaatgagtatcttgaaaatctaaggttctttagggctataggattgtatgcctatcagcttggattgctttttgctttatttgactgtggccaaaggtggaaaaggccttcttagatattcttactaggaaatgtaatcttgaagtctatgtcaaagctttcacacaaaattggtataaaatttatacagtggaacttactctaagcagtcaataatagctatatttctgaaaagatgattttaaagccaactgcaataaatggaataactaacatttacatgtgctaaatcttctaatttattggaaatattgaagggccattaaatttaaaaatgcttttgtaaatgcaaaacattaacctctaatttaatccttgtaggaatacaattttttttaaatcaaattttcctgaagcagccatagctgaattagttgttttacttttcaaaattcgcggtgaagggttacatttaaagcagagaggagccccctttttcctcttcatttattctaagtagtacctgaaagcaaaagttggcaggccgcaggcagagaataggtcagccacattgttccttgccttgctgatgcaaaagagagaacatttcaaagtaaaacaaggattggcatcagagaaattgagttctgtgctcttttaaaataatcttcctgaggcattctttcagaaaactagcatttaccctccccataccacacgagtgaaaaagtgacctttttcagagagctcaaagtcaaattagttctgtaagtcagtctagggggaagtgagagccaatttgtggtcagggttgccaaagagccaatgtccaagaaaagaagagaggcagggtggtcaggacgtgctgagaaagactgaaaaaaatagggaccttgcagctgttgaggccatagtagtgactctagggaacatgtagtctaaaaagcctatctaaaagcaaagttcagccttgagagcaagagctgggaaggactcaaggaatgccatgaactccacatgagggaaacagatcacaatacataaatgtaagttcaaaggcagaagaagagaaagagttatgagaggtaaatggagagggtaccatgtaggaagtcacagagaagcagtaatacaaggaaagattataggtcacttttttgctcttctgtcagcaaaacccatgtagtaaaagaagtacgtcagggagaggacatctaaaggtttcttttttttctttccctttttttttttttttttttgagacatagtttcgctcttgttgcccaggctggagtgcaatggtgtgatctcggctcactgcaacctgtgtctcccggattcaagcgattcgcctgcctcagcctcccgagtagctgggattacaggtgcctgccaccatgcccagctaaatttgtattcttagtagagacggggtttcaccatattggccaagctggtctcaaacttctgatcacagatgatccatccgcctcggcctcccaaagtgctgggattataggcgtgagccactgcacccggcccaggtttcttacatgacttatttgaagaagacaggaacagacaacagatgatcatatcaaagaccaaaaacaacctaacatgacagttaaccttggctgcagaattcttattaattcctaatgagagtagactgatgataacacaattatgcctgaaattaatttgaatacataatttaatgtatttatagtttatcagcactataattttgttagttttaaatttttatttaaaaattatttagatatatcaggagtaaaaattgctgaacctgggagcacttagaattttgacaggttgcagtattcattaggatactgttagatgctgtgacaaataatccccacatttcagcagcttaatacagtaaaggcttcttaacagactagcgtaggtaactgttcccggccagtaagagtgggcagatctgctgcatgtggtcatttaggaatacaggctgatggaggctttcccactatcagtgtatgacttctgttattattctgggcactgatgttcatctcactgaaggggttaaagaatgaagaagcgtgcatgaaaggtttttttatttttcttcacattctctcgctgagaatgtaaccacagggctacagtaaactgcagggcagactagaaagtatagtccaactgagtgcccagaaagaagggaaatagagattttagtgaacactaagaagtttctgcctggtacacataatcactggactcatgggagggactgtgataccatgtctacatctaccaaagactttaaacatactgggatcttagtaggctcctgaatgggttacaaagttggttcttggatatagttagtatgaatttgtagaactagcaacagtggaatgctgttggatagtcaaattttcctaaggcatagatttattctaaattttacttgtattctaatctctggggtttatgtgactcattcacataaaaatagaaaaatcagtgtatatctgataattggcagtattcactgattttatccatataaaatatcttttatgatagaactaaagatgtgacatgtctttgacaaatcactgtgcctaattagaatattatgtttcaaatataacttaaaaatatataggtgggtacatatatgcattatgcatatatgtacattagtgtgtatacatgtctgtgtaccaatgtatataactaaaaaaatttctgtgcaggagttgaactacaacagtggagataaactcataatttgtttgctatatcatggactttggaatcatctgttttcagattttagtaatgctatttaataccgcataacccttaagcaaattactcaacctcattaagcctcagttatttcatgtatacaatatgaataacaatagctgtttatcaaactggattattataagtaataaaatgagattatgtatgtaacacacttcttacagaatctggcacatagtaaatgctcaatggcatatattatgcatattatatgtatagtaggaagcttgacgtggcctccagggcccctgtaacacacaaaccgatggtgcagatagacatgaaaatagataggaaatagctggctgctgagatttaatagcttcatttattcgttcctttgttcctagcagtaaatactgctcggcccttaatatgtacaagctctgagtgatggtgggcacaaaaattactaaagcagctttattgttgttaaagagtttgccacctgattatgagaactctagcagtcatgatacaaggtgacatttacacaagagaaataccacagagtgatatatggcttggaaataaggaaaaatatttcttggaagggagagatttgaagaaaatgttttggacatttagaattctgagtcttaaactggctcttaaatccagaatttcaagaaatggatagaggaaagagagacattcaattcagaaagaatagcatgagctgggaatcagggaaaagcacagaatatttttaggcaaactgaaaaataagcaaagggattactatgaagtcaaactgcaaagtcaagccattgatgtcatactaaagagttggacttcattctgtaaacaaggagaaggaaaggcaaggtgagaaataagagtgaggaaggcaagttctgagcagcagaatgacatctatgcccttgaacattttacttggcctttttctccattcattttcctcccctacacagcaaatggatggaactaagatcccttcctgccctcacagtctgggagaccactacatcctccagagtcactgtcattctccgtctgctggaacatcccgattctcattggtgtaacctctccaatgctatttacctaggctctacccagtactgttgtcatatcctttagactctacatttttcttctctgtgggcctgcttttcatcctctgcaataggaacatgagctgtatctcattcattcatagagaggtgtcttccaagcccagatctccagctcctgaaccactccatcagctatggtgagattctttcctggacctcttccagccttcacctcaattagctgggcatgggcagctaattcattcttgcactttctccatattattgcttctctcctaggttttttattgtggttttgtttttgttttttgttctttgacttggtacttccactgttctggaagaatgcaagcagaaatatcaaagaggaacaaataagaaagaattactggggaaaagtgatgcctttataagagtaaaacgttattcttcactataaagtataataagagggaaattttcttcttttacttgttagaattataaagatagttatatatgtacttttttcaaaaatcaagctgtgcgtgttagctcatgcctataatcctagcactttgggaggccaaggagggtgtgtcacttgaggtcaggggttcaagaccagcctggccaatatggcaaaaccccgtctctactaaaaatacaaaaattagctgggcgtagtggcgcatgcctgtaatcccagctactggggaggctgaggcaggagaatcgcttgaacccgggaggcagaggttgcaatgagctgagatcgtgccactgcactccagcctgggcaacagagtgagactcagtcaccaaaagaaaagaaaagaaaaaaaaatcagcactagcaatgacctggtttttacgtagcacttcctaatagcttgcttctctttttgtgaataggatttagcacagatatcagccagtatactaagacaattaaattttttttcagagtaaataaatatcgaatataccaaaatatcattcagtaatgcgattctgaaactaacgtcacaaattaggttcaataaaagaacaggatctttttgtctccaagtataacatgttatttctttcgtaagtcttctcaggacttaaaactgcttctttgaagtattctttaaagctttcagcctctcttgtcttgtcatggctacagtatttgttaattaatttaacaaacatttttggggtgctgaggtaaagaaatagattaacatccagactttaccattgaaaagtccacagaagaaggctaacatgtaaatacagaattgtatggaatgcagtagtgaagtaggaggtgagactcagctctggaggtggaacttggacactggaccaaattgcggactagctaaaacaggaccagagtggaagagttttccataagacacacctaccagtgtgccatgtcagcttaccattgctatggcaacacctggaagttaccactcttttgcatggcaataacctgacaacccagaagttaccacccttttcctagaaatttctgcataatctgccccttaatttgcatacaattgaaagtaggtatgaatgagtgcaggactgcctctgggctgctactcagagcacactgactatgggatggccctgctctgcaaggagcagtgcctctgctgctgctgtacattgctgcttcaataaaagttgcagtctaacatcaccagcttgcccttgaattctttcctggatgaagccaagaacgctcctgaactaagccccaatttgggggcttgcctgcactgtgtcagtaagtgatagaatagagctcagtatgtggtccaggagggagtgatcagtctgtctgtgatgtcccggggggaatcaatgagaaggcaattcacaaaattcacaaaagaggctttgaaaagtaaattagaatttgctgggtcaaaaatggagaaagtatggcccaggcataaggaatagaaagcgcaaagacaaagaaggaagttaggatattgtgcagaattaagtatggcttgtaaatgggtgtgaagtgatgggtagtgagagaagaaatgggagaattggcggggactagatgataaagggcttttcatgtccaacgaaagagtttagatattgactattgattcccatttgtttattgttcatctgtttttggttttgccttgtattcattattttggggacacttccccttttaggcatttgttgaaagaaagctcaagaccttctcccaagagaaagatgcacacataattacttttgcatacaaacacatccatgaacttggaacccaagtttcaaaccactgcaaaaagtcactatgagtcattgacaattattgagcagggaaaccacatattcaaaagtgtattgtcagccaggcacggtggctcacgcctgtaatcccagcactttgggaggccgagacaggcggatcacccgatgtcaggaattcgagaccagtctggccaacacggtgaaatcttttctctactaacaatacaaaaattagctgggcgtggtgggtgcctccaatcccagctactcaggaggttgaggcaggagaatcacttgatcccaggaggcagcggttgcagtgagctgagatcgtgccactgcactccagcctgggtgaccgagcaagactctatctcaaaaaaaataaataaataaaaagtgtattgtcggccacgcatggtggctcatgcttataatcccagcactttgggaggccgaggtgggcagatcacctgaggccaggagtttgagaccagcctggccaacgtgacaattccctgtctctattaaaaatacaaaaattagccggacttgttgtcaaacacctgtagtcccagctactcgggaggctgaggcatgagaattgctgaatcacttgaacctgggaggcggaggttgcagtgagctgagaccatgccactgcactctagcctgggtgacagagcagactctgtctgccagaaaaaaaaaaaagtgtatcttcagagtgaacccctggaggaatgtggagaatctattagaaggcatgggactcatgttagggaaaataggaatttattgcaatatttcagccaagaaatgaaggtctacgataaggtggcagcaaatacttgtttttaatttggctcctgctttgtgttgtctatctgcttattgaggagacagtactacaagagttaaatgtgtaaatggtgttattactgaagtagtgatttcagatataagtgcagcttcatgaggaaggatgaagcattcagaaggcatgatgggtttgaagtgtctatgggttagaccactgcaggtatggattagcaggtcaaaagagatgtcaaaaatgattttaaaaatattctgtttcaccatatagagatgggagatttaatagtgtgaggggatgagatcttagtggtgaaagagcgtaaattaagaagagttagaggcatcagactggaagattggtggagcttgttccctaaatcaggaatttaagccttaactctcttgttaactactgctctgtgttggtaccaggtttgtgaatgatcaagccactggcagaagattactttctaagagtgagagccttcccagggcttcgaatctggttaagtgaaagaatggagaagacggtaaattttaagaaaccatctgatggatgttattaggtcacaaagttgacattcatcaagctaataggcctatcgtttattgcaaactacctgaggtcgggtaaattattacctggattaaaaacctgatgctgacactggttaacacttgttacttacctttctgaacctaaatttctccatctgtaaaataaagtatacacacctactcaagagccaagcagagggaacgagataacctatataagccacctgtatagctgctgtgcaaagaagctgttgaataaggagttggggctggaaactctgacctacctctttaagttttgtaataaaccttccagttctaactagtcaatgaatgacccattttgattctcagacctgccactgcttctacctatctgaaaaaaacaaaacaaaacaggaatttgaaaatctgttatagaagtacattttatgtttagctatttttttttccttcctctatgatctgtaggtatggggtgaaatgattatattgtggtcactttagaacgttcactctctttgggaattaagtaattacaatttcttgaactaactgccttatcctacagcctagtacagtgacagctccaatgtagattcttgggcatgcgttgttttcttgagaacctttggaattctagccatatcttgctaatgatactcacttagcctcatcaaagtctcactgatctcttttctgtacttgagatattaaatgaaactctcttttgagaatgtttgaactggaaggggagacttcagaattcatttagtctacttcattttataggccacaaactgttcattttaagtttggtgtgctcaagacctgatcatattttcctctctattcttatatcagagttaaaagaatgttggctatgcacttcgcgcttacacattaatatagagcccagactgtagggagaattggagacttgaagtggggaaagaagattggggagcagaattacagtgtgttatatagtactgcagcccctcaagggagctgtaattaatgtgtgcaaggaaaacactgcaaggaaactaatttaaagaacatactgaaacaattttctcccagcttttcaaaacaaataaagaaaaaaagaagtcaccatcaagttttgaggaagcatgaagaattccagcagaaaggaaatttgttgagagcccgagaaggggctgctggttagaatgtaaagcctcttttaaacttaggcttcctccaccatttgtcagagctctgtggtccctgatccattcattaagcatttcacatgtatgtcactctcattatgggtcagagtttggttacaacccattgactgctctttctttgcatcttggagactcagttctttataccagttgatatcccgctagcctttcctttctgctttcctgcttatccttttttatcctaagcttgttaggtaacttcagagtttagaatgccttgtgatggtatgtcacttgatattgatgctgttaattccctagagcgaagtcttctcaactttttgtctacaacccataataagaatttcattttcaatccaacccagtacacacatacgtatgttattgaaaattaaagtttcatgaaaaaatactatgtgtgatatgctttgatacttttgcttctcttcaactctatctcatttatttaggaacaaaaaagcatcaaaactcattgaagagggccatttgattctcagttctaatcactatgagtatgcttcacacattgaggtcttcagatcatctgcaacaagtcacttgaaggtgtctggtcccaaaccctcccccagacctattgaatgagagtccgtattggcaacttctaggaatacatagtttaaccagttccttggtgtggttttaaaggttaaaaactagccccagatgttaacatcttaacattatctactcacaaaaagctatctcctttgctagttgatttttttttcttttgtatagctatcaatggctagagcaagggctctgatcactttttttcccccttctagagatagggtcttgctctgttgcccaggctagagtgcggtggcatgatcttggctcactgcagcctcggcctcttgagctcaggtgatcctcctgcctcagcctcccatgtagctggaactagagtgcatgccactatgttgaggtaacttttaaactttttttttaaagacaaggtctcactatgatgcccaggctggtctcttggctgcaagtgatccttctacctcagcttcccaaaatgctgggattgcagatgtgagccaccagacctggccagggttctgatctctgaattcccccttcttcttgctgatagagatcagctcaaaaggtactggaaaccttgaacatctagtaataccttactatatgccagatgctattctaagtgtactatatgaattaaacctcacaacaaacaatgttttgtatgtggtactattaacccattttacagatggggaaactgaggcatgacgaagtctaatttttctgaaattacattgcaagcaaatgacagcactgggattcagatctaggcattctgactctagagcccataatcttgaccaacaccctgtctaattcttcacttagcatgaaacgggagatagtgattagcccaatttgtcactgagagtcttaggtgatttcactaacctacagcgtgctacaggaagataaattagggggtcacttggtcccatctctactgcgtacccatcctcaactctagggatctgatgattactcttcctgcacttgtctgtctgtcttaagaaggagggagagtagcagctttctgccgttatctctagctttgactcattgtcacctgtgaggctaacatcactcaagcctataataaaattcaaatacttcaaatacagcaaacttaatacttagtgattattatatcatataacaaatgctcttatggatcattaaattcattatatctaaatattcaaatgattctgaccatacaaatgattctgacaagacaaagggataatttatttaaagtatatatttagagcaaaatggccttcagaagtcattactaaggaaactttgtcaagtttcctgttggggcatgccagctagtcttcaagggaattttctagtatttctcctaacacgtgccacagtaagagaccaataaagaagagttgaattctgaagaatgacttcagacagtaatcattggaggtgaattgcgactgttgaacaggcagagaaataaggaacagatatctggtcagagggttcaacatatgtgaagactaaggcatgaaggattatgtcgtcttcaagagctggaactgagagaagggaaaaaaaatcacacaatgagacaaggaaagactgagttgagttgagaagtttcttacaagcttacaaacttgggtctactcttctctgcactcagctgtgtatgaaagagacctgtcaggatctcactgtgggggctcatctatgccccaagtttaagatgcttgccccagatatactccagagttttagatggctttgggcttgcagttggctcatacacataaagtatccagaagtacttgccaggatgagtacacaaattctgtctctcttctatagccctgttcagttaggaataaagatgaaaatgagggttgtgatagctgtgtgtgtgtgcacatgcgtgtatgtgtgtatggctgtgtgagtgtgttagtgtatgcatccttgtgtgcatgcacttaaatatacttatatgtacatgatagaaagatccatgtttcagacaggagactaagatagaaaattaagtagaaattttataattttgtttctattatttacctgccatgtgtttgtctcagtgtttgaactgagaaataggcttttagttactatggatatgataatgttaaaacaaacatcatttatggattgtactttatatctcaaagttttccgatatccttatttatgtattattttaattttttcttaacctatgaaaaaagctgggtgccatggttcacacctgtaatcccaacacattggaaagccaaggcaggaggacttattgaggccaggagttcaagaccagcctgggcaacatagcaagactccgtctcaacaaaaaattaaaaaattagccaggtgtggtgacacatgcctgtagtcccagcaactcatgaggctgaggcaagaggatcatttgaccccaggagtttgaggctgtagtgtgctatgatcacatcactgcattcttgcctggatgacagagtgagaccctgtatcaaaacattttttaattaaaaaaattccaaattccatataagactatccctcagtgtgccttcccagctgccctaccccgaccctatgtcagactgtgatttgtagtatgtttcttcatatttattttgagtattaataatgtaatcttatcatattcaccctgataggacactgtagagtttgtttaatgaaccatcttgggggaagaattaaccaacaaccaagatttgaatacagcttggtcctgggcctccttgggccatagcgcaaggcagctaagtggtgctggaataatttctctttgtttggctgcagataccgcatactctaagcaatttgcagccttccttatataagaactgtttctgaaaggaaattccccaagtccagctcttctggttatttccgtttcagctctgaagcgcttactctttgtagctgaaatatggagaactattgtattttttggttccctaactcagaggaaacatgtgaggaatttgctgtaataactgatctgagttggagtgtttgattcctgacacagagtggaggacagcattgtgaggggacatttcattcaagattgttctgttaagcgggagggaggtgagctgctcacagtctatgtcaatgagaatttccctcaggatatttagtgtgtggtggtaatgcatatttaagcttacgtacaacaatgtttgcaaaatcccaaacttggaatagaactctagatcatagtggccaaagaaactgactttgcttgtaagcaagttggatcaagatctatatgagagctttggggctaagggaaataaagcattgtcccaagaaggaagactttgccttgacaaaacattctcttacaatgtgattctcctaagaaaccataaaagagcagttagggatccatccatgcattttaatatttgaagagtttcagactgactgcatgtttgacagctataggaattttatttttataagaatttatctataaaaataaaagtatatctactatctctaaatctatatatctgagttttaaaaatatagcttctctttagcttttgctagcatatgctgtcaaactccttcatgctgccagactcatccaaaaattaattcttctaatgcatgccatatttcatgttgttttggctgcttttgtacattctgaagaaaacagggaagataatggtttccttttccaatttaacatatacatgcgacagagaaatgtaaggatgttgcactcccagaggatcaaacctaaaatgacaatagattcgactgatttttttaaaaaagaatcctactttatgtaatctggacaataaggcacacatggttggattaaaaatattgtgtttttaagatctctttctaattcttactttataaccataaagaaatgaggctatgtgttgttgcaagaagtcttattgcaaacacatgcatgtgcatgtttgtgtgtgatttgtaaatttagctctagaaaggtgtaacaataaaatggaattgaatttagccatggctcttacgagcgtgagtaaagtatgcatgtggaaacctaagatgttaatgaaatcagcatagactttaatggcattctggtgtcttcaaaagatcgccaccaaataaagcttaatgtgtcaaaatggaaaccccaagtaagagaaatgtgggaagaagttcaaggaacagaaactgtttggggaagatgatttgaatgtcttccaaaaccttcgagaagcattaagctcaagctcagccctttatctttgacaaataccacactgtgtatctgcttgttatttcgtggtcctgttgctcctgtcagcttgttaaatggaactctggtttcagtcagatgaaaatgtggtaatctctgtgctttgcttgcctcggcgtccgaggagcggctgtgcccgactgtgtgaggccgcccagtgccaagggtaactactggcacctgcactgacagcaagcagtctgcagcaacagattgaaaatgttcttttcagatctttagattggaacttcagctttacttttaaaagtttcatgtccacagcacggttgacaaaataaattactaaaccaattgctttgggagcttccaagctgtgacattaaggtagctgcgagtcatcattcttgatgaaggagcagcttcagaaattgtgtgcatctgatggaggtttggcaaagtgtgtaagtctgcagacctatggtaaacaggtctcatttctaagcatttattttcagaaagggaaaaaaagagctgtccattctcaatttcggacttattttaaattactcacagggaaatgggtgccccatttaatggcattgtttattctcacagagaaatgtttgcagtgaaaatgcaaaataccatttcttttctctgctgaggctcctcatcctatggtgcccactttactctcccagcagagaatgcagaaaagcaccaaaggcagcatcatgaaacgcagagctgttaattcccaactccgtcagagttctgccctccttcccatttggggagctgaactgagccattagaactttccttttacactccctctagaatacaagtcctgacaaaattaaagggctttatacccctaaagcctcagaaattctacagggtacggtgagggtaggggtggggttgaagggatgggaaattcataggttaaaaacaaaaacttgggcgaaaaatccaggctctgccagttactatcagtgggacctcagctagttacttagacatctggccctctgcttacttgtttgtgaaatagaaatgatcatatctgcctcatgtgcttgttggaaacatataaaacaagataacttcaggagcaaagtgatttatatctgcaatgttgaaatggataaaaaataaaatagatatgtgagtgcatagatgataaatatgtcataaaacaaaggcagcaaagtgttagcaattgtaaggagagatgtgggtgtatgcatgtttgttatataattctctcaacttttctgtgcatttgaaagcatcttaatcaggaggaagcgatttagaagggcaaatcttttccatgtaagtataattcccgtattccctgcctctagttaaattccagatgtaggcacatggccatactgaacctcagcggagaatggaaaaaaatatatctttttcatggaccactgtcagcccagcaaaaatttagaaattttatttccaaggaagagagataatgggggaaaaataggcaccttgattggtcatgcaaacttaactctctgtggcacatactacatgccaaataacaaatggtgccattcctattaaggaagggaagtaatgcctgccccttttcttcctcggggtggagtgtcctgccaagtctcctgtcctttcctgggtgacccagggggcttattgcttccatccctgctcagatggttttgcatttccgtggcagcattttactccaccctccattgtgcatcctagattctctccagaacccctcccagcggaggcctgaggttagcttttgtgtgacatcgggtctctattcttccatgtatttaagctcaaaatgtttccttatggggaattttcttaaaagtcttcaatattgttaactctttgaaaccactgctgtgtgaaggcagctgattgttccattgtgggtcccataggaagaagttctatggttcctccttattgccttcttggtgggcatcccctatgaagcaatgcagggaggactccatgatagtgcaggcacttggcctttgatttccatccagggaactccctccacctgtctatgagagaactgtgttgtggaagctcaccgggaagcctatggaagaccaacacatagaatgggcagaggaagacaaacctccaaaacacaccgactacaacaaatacaggacaacaaacagcaataacattgagaataggaagctcatcatggaggagaaccaggacagacatccacgaaacccaaaagaagaaaaaaattcaagaaagactggtcaattgcatctaaagctactcagtgactaaaaaagataagggctggttgttgtcctttagttggtgatttaatgaagagccattccagggaagcagtgggggcgaaagtcaaatttcactaggatgaagatgacagacaggtaaaggagggaagagagtaactgtgtaggaattcagcagcaaaaaggagaggtttgtggtcacaagggtaatgcggtatacggaaggattttgttttgtttttgtttttgagacaggctctcgctctgttgcccaggctggagtgcaatggtgcaatcttggctcactttagcctcgaccaccccaggttcaggtgatcctcccatctcagcctcacgagtaggtggaactacaggcacacaccaccatccccagttaatttttgtattatttttgtagggatgggtttttgctatgttgcccaggctggtctcaaactcctgggttcaagcaatccacctgcctcggcctcccaaagtgctgggattacaggcatgagcaactggactagaaaaggtttttcatgatgagaaagacttgagtgtgatcaaatgctgataagaagggaccagagaagaggcagaagttaatgatccagaagagataggaagtagctgctagagagaggttgcttagaaagaaggtaaggtaccatccaggcaaccggaggagggattggccttggctagaaggattcctctcacattggataggagagtaggcatatgccatggtttgcatgtaggtcagctggcacagggtagaattgttactgctttatttagtaaatgtattcctctaaagtcatctgcaatcatatcacattagccctttttgtgacactgtgttttttttgtttttttttttttttctggagtttattagcaaatgagatttcattaccagctcctgctaaacaatgtctcctctatcccacacttacgcatttctgaaaccaaattcaagtcctaacatttattttcactgaaggtcatactattagatttagatcatgtttccaatttgtcaaaatctttttatattttaattgaactcacaacatatcactgatgtgtttcagtcttgtgttacccatacattaaacaatcagctgtatgtatgtcttcatttaaagaactgtctttagctctattttacttttatttcatcaactactctctcccccaaccccctgagactcaagggaagaagaattaaactgaatgctttgatgataactgataaagccttttgtcctaaggagtcctcccaaattggattaagaggattcatttgtgttttgcggtgtttatatttgaggaagacaaggatgtgaaaactctcactctctctgtgttcattctcacaaatagatggataccgtcacttttcaaggcttgtccatctggaatgcatcacaaacacattgctgggaaagtaaaagttccagaaagagcttcgttttctcctggaactgtgaaattgagtggcctagttctctcctccatgttgttgtaaattcacaggagtgtaatataagctacatttttaaccatttgggatagcttatgattgaataatgcttcctgccagacatgttttccctttatttatcacttacttttctctctaatttcagcaacagcaattgctgattatgaaaatgactctaattgttcaacctttcataaccacatttaactaccaaaaacaatctatctgctactttgaaaagcagttaaacaagcaagcaatttattcctgccttcttgcaagcaaccaggaacagggccgtgttctctttgttccttgtactgctttggaaccatgagtgcctctttctaacttgaatcaaaatctgcttgttcctaactgctgcctttgcaatcagtaatttgactcagtgggcttaattcaaagcaggcactcacattctttagactctttgtcagtcttccaggaaatcaagttgaacaacaaaaacaaacaaacaccggccctaaattaaaccagatagggaggaagaaacgtcaatgaatgatgaagcaaaataacaagagtcaggagaaataaatagaaaccatttcaaggctccacctgccgtggccccattagcccctcctttacctccctttcctagaggaaatcaaagcaactcctatgagcaatcattctagtcagcttccagacttccagagcctgctgaatctagctcctcccaccctgcccccagcaggtgagcacacctgggatcgctgcaggctgacattgcatcgtgatttctctgcatctcaaacagccggcagccctgcagaaacctcttccccttgctgagataaagtatatgaattaattcccttttgagttaacccgcgcctggttcctctcagtaactactggtactgggatagagaaggagttggcagctctcttagaaaaccagatagttttccttctttgtgatgtgctcaactttcttttgccccaggcttgaaaatacatgccctgtctttaactttccttgtgtgaataaccagggctcaacaaggtaatagttgggtaaaattgttacagaggcattccaaatctaaaacagagatgttccctggtaaatctgatcttatctaatgtttcctaaatgtaaataggccagagggtgttcctttctgaataccctttaaccagatacgttggaaatctattatgtattgtttattttaatttcgttaaaaatgttctcaggtttgaagtgtgatttctttgcgctctcatttaattttttcttctttttagaataaattattgaagacagaactttttcaaggtatttatagatatatctgaggtattcatgatttatataaagtgtacaggtgaagagttaccttctagtatagaccttaagcatgttatcatagctatgtgcaataaaggtgatattaagtttatttaatattgctaccatttcttctaatccttgaattttctctggaataaagctgcagtgtaatgaatgagattaataaaaatagaagggttatgtgtaactggaaagtggggaaatcactttgttcatttatggtagaatatttaattgaggttcctccacacattcacattaggaaagtcacttggtctttaggtttaaaaataataatttaacttcaaacaatccttaactcttcaaaatgtttaaggaattaagggcaaaaaaacctagatatgttccacaactttggtgacaataaacatgaaatatggaatccaatttttgaagaatatagccagtcatccctttaaaccacaaccatttttacataatgtatagaattaaaaaacactggtgaatcaactctgtgctgtgatgtgtattaccagtctattggatctgtgtattgggtgtttggggagcatatcgacattatgggcaatgcagttatttcccatgacattttaaaaatccatttctgtattacatattccaatctagtgaaaattacatctactctatttagatttggcatccaacacttgttggccatggcatgtgatgtaatttaaactgctcatgtacatttaggaggagattgatttatagccgtctttgcctgagacaagcacaatttaaactaattcttattgatccagaaaaatttaagattggttttgaaaattctcaagaatagagagttttggatacatttgagccattttgctaagcataattgtcatgtatataaaagcatgaaactgttaacacttatccttctttgccttggcgtctttgttagtcattgcatacctaaaggctaatttctgctccagatgctgtgatgtctgcccagctggcccagctgttaggatatatgctatttgcaaatggcagcataaatagcatatccagaatattttgcaggctggggctttgccattaaaggctaagatatatttagtgtcagggataattgtttggtatattgtaaccagaatggagctgacagaatgccaataggtctagcagagtgactcataaaatagtccaatgaagaaattatttactcaaacatttccatattagcatgtaatgtgcactacaaattggatttcctgtgaatgtacaatcattgtgtgcagagtttgtaaaggtgtctgatattgcaaatgtatcatttaagaagaccaaattgcatcagattctctaaccaagtctcttttagcatctaaaggagtagttcttctaattattttctgattgcaggatagccttgttggaaatgctcaacttggagttgggaagaactgggttctaaattctagcaatttctatgatgacccggtgacattaaacaaatctcccatctttcctaatcttttctatttctggtttctcagtttataatattgaagatacctgcattttaactgtttttgtgttttgtcaaagaaaggtgctttatacatagtctaggtctatttgcttttcaacttttccccaagatcttctgtctttagatgtatagttttttcctgcttttttttgtatgtatctgtttttagctacctaggtattcataaggtgattagaatgcaacggttacatggcttcttaaccacccctaatttagacaagcatttctaagtaggacttctaatattcaaggcaaagaatattctagaactcagaaagtttgcttttatattccaaattattttattgttacatctaaaaaacagtggtgtctgcccttatctgattctggatgctgctaaaatatactgctggacagaaatttgattcattaacttttttggatcttaaccttttaaaggtgcagtatgtccattgaatctacagctttaccgaagcccttgacaaggcactggtatccacaaggaaaggcgaatgttgatatacagtgactggaactgatttttatcaatgtggatggtaccagactaagaaaattatccatctgggccatgcaatctgtctttccagaaaatcactgaactacatatctaataacacagtcagtgagataatttccttttattgagtaatttcctcatttggtagggattttaaaagcctaggggcattttgagcatatggttcaggaacattattttaaaatgtgaattatcaatagaatttcaatacaatcaaagtaaaataacttacttcctaagtgttacaaatataagcaggatatttctacaaaggctgttgcttttgagtcagagttaggagctggagattaaaagcttttcttcagcattgttagagcagggtgcatcattctcaattgccagcggtcaattctctccagacacagttgatcgctcctcccacatgaaacaatttcttcacttgaattcctccaacctcgctggctgtttcttcccaatctcttttgctggttcccagttgtgtcactccccactcattactgaagagccctaaagttcagtccttgaactccttacctatcaacaatcatccttgcttatctcagctagattccgggctttgtatactgatcaattacaaatttgtatctccagcccagacttgtctgctgaatttccaacttgtacattctgctgcctactcagtatctccacttggatttctagtaaacatctaaaatgtgtcatctccaaaactgactttctaatttatcacaacacttactttcaaaaaatacatgcacaccttctgtagtttcctgcctcttaggtcacagcaactctattcttccgcagttcaagccaaaattttcggtgatctccttgactaccctgtttctcttactttctctataaagtctcttagagaaaatcttgttagtgctaccttcaaaatatcatggtgtgagttcaagcaatgtactttttcttttccttgcatacttactccagtggtctaccttgttgaaatatctaagataggtgacggcacgggcctccagggccactcttaattataggccttgtgcctcagggtttcctaggctggcggtgcgttgggggaggggggggcggcggggcggggagggggtggagggttgggaaagagaagaacctccataaaggtagaaaatgattcatcttatatttctctgcaactttttcaccagtgctcagactgaaaaaagatgatgactggtggtcattaaaaagttaattttccgtttacgagcaaacctttttgggtctttgaggtcatatatagaccacgataagcaaattatcttatagattgtatctattttcagctgttataaaagtgttttaaattagaccaaggctatttttagtttttggaaagttagcttataacaaaaatcttgctttttcataaaaaagttaagcatattaaaaaacagaaaaataataccatatggaaatagagttggctgggtgtggtggcttgtgcctgtaattccagcactttgggaggctgaggcgggtgcatcacttgaggccaagcctggccaaacattgtctctactaaaaatacagaaattagcctggcgtggtggtacacgtctgtaatcccagctactgggaaggatgaggcataagaattgcttgaacctggaaggtggaggttgctgtgagccgaaatcatgccactgcactctagcctgggtgacagagcaatactctgcctcaaaaaataaaaataaaaaataaaaaataaaaaaaaagaaagaaagtagagttaaataccacagatataggaagtctagacaatatcaaaggaataagatgatgcgattttgaactaggaaagggtagatgagagcatttatttatctaagatcttttgtatagataagcagagtaaacaatcacccttatatatgtagctctttagtctgcaccaagacactgtccaagtgggaaacagggagactcaagcaaatatcctgttggtgttgtctctttatcctactttaaaaaacactaggatctggactgtgaaatctgagagcagtctctgaagagacacagatgaaagtgaaaatgctgctctattttctatcacccaatttcttgtcacagttactatcattaaaacatattaaaaacatggaaagggctgaaagggaaggtacaaatctaataagatttgtaatataaataaccctcagtatgtttttattcccgattgccttgcctccttaggttctgatatttaaagattgggttaaatatctccttttctgtgtataaggtattggcacaatttttttttttcttattcacttctcctcatcaggcaggtggttgaaactacgtaatgcttgtcttttatggccattttcagagagaatcattttcaccaggggacgatctcctgtgttttttgttttgttttgtttttttacccttttctctcaatctcatctcaaagataaatgggagttaacaactctggttaagattatgctcattttcaaatgctttctttatactttttagccttccataatataaataatattgtggtgctattgtaataacaaatccaggaaaaagaaacaccttactgtcccagactgatcttagtttcagaaaactctgccctcagatagtggttatacataatacttatccactgcacccaatcaccagggtgctattttgtaatgagaagtccagagaattttctgaaggcatgacttaatcatcaaattaccagattttaaaaggctgttacatgtttctatctctgttcattgattctgcatgagtcatcatccttggaaaggaaaatgacatttcccccattggaaattggcagaatacatacagaaggcttaacttctaaagttctctgcatatggggctcttgagctgttatatcctctagaaaccttggtcattcagatatttgtgatttgtatagcgtagaatgtacttcaccaatcttccttctccacagagtatgacaacatctctactgcgttcatatgacctttttatgtttattgtacaacagtatttgcattcgaattggtaccttaaattataatctctaaacaagatttcttggtgcgtttcattggaacagattcaaagaaagagatacaggataggattatcaatggcctggctcgcagggacttatatagtatgttcctgacctctctggtggagtttaatggaaatggctttggagacaggaaatactgggttccagccttgtctctgtggcatacttactccatgaatttaggcaagttatttgtctcttcacatggtcattgagaaaatgaaataacaaatctgtatcagtaaggcacctgggacaggtagcctcttgatggatattacttttctttttcccaggctgtcctgttgccatcttcacacttttgcctaaatgcagagtttgtttgtttgtttgtttgttttttaatagctagggcattatttaaacatttttgttaattgagaaatatctgaagcagtttttaaaaaaatagggagcactggccaggtgcggtggctcacacctgtaatcccagcactttaggaggctgaggcaggtggatcatgaggtcaagagatcaagaccatcctggccaacatggtgaatccccgtctctactaaaaaatacaaaaaattagctgggtatggtggtgcgtgcctgtagtcccagctactcaggagactgaggcaggagaatcacttgaaccctggaggcagaggttgcagtgagccgagattgcatcactgcactccagcctggtgacagagcaagactccgtcaaaaaaaaaaaaaggaagcattatgtttgagtgctcaagcagttttagtatatgaacaagtcaaactcaatatagtcatgccagagacattagctgcatgtgtgggaatgagagtggagtgtcacaggaggctgaaatcagagccaacccagagtgttgaacatgatttcaactcttccaattgacatgatattttttccctttttgaggaggaaaaaatgctctagcttgctatatcttgtgtttgccacctgtatagtgggctgcaaaagcagggggtgtgggagccaaaggcaatggctaattagaaaagtgtatttgaaatgtcttgaatgcttcaataaataaaattaactgacactatagccttaccaaattgatgataattatattgggtttcctgtgattccagtgaatgtgggttttaactaaatacatccaccttattgtcagttcatccttgcattattgtgggagaaaaacttccagtgttcaatttcttgtattgtcagtcatacaacttaaatttttaatttcagtataatcttgccttctcctgcctatttacaacttcctgaaaacatatcgagtgtggatcccgtacgtaagtgagattgtcttcgctaagagcttcttgcaatcacaggaaaaggggaaaaaatgttgttacagctgatcattgccagaaggtgaaagttcaagaagtagagaaaaagaagattgtagcatgtaatcagagttcttggttgcatgctacagaatccattctatgtagtttaatctgggaacaatgcagccagggatgacacctcaaaaatgcccagcctcaacactagactgtcctagcagaaacactactgctgctattacccacatattgtcacttacgacattaaagtccaggggccagaaactctggcacagctcctcaagagaaccagatactctgccgccatgctttctcccaaggagccattctttcatgcagctaatagtttgtgttgcttgctttcaccttcaacattcacacatttgggttggcttggtggctccacattcattacaggctagttcctggggaacctgggaaatgtagttttagctttttgtcttctatagtatagcaatcaaagtaagctagaagggtgttggaatagatgctggttgaactgcttgttagtatctgctcctgatggaattgaactgaaagatgttacaggtgtttactcctcagtggtccatgttggaatgtcactttctgttttcagaagcttattactatatgtaaaaaacaacaacgacaaaaactattgcttttttcttctgcacttgatcaaaattctgtttaggtatccacattttaccattatatgtattcaacagtgcagaatgctggtgaccagttttacttgttaaccaaggcatggctgagtcctcagagacttttaatttgactccattcttaggatgatgtgctgcatttctgcaatggcacccactggcgtgcaaaagaaaaactggattttccaggttaagcagaaacatggacgccatactaaactctgaacagacacattcatgcatcttcttgtccaccagctgcaggaactcaggggttttactacttcatccttttatgcccaacaccccatcagctccagaggcagcttggctgcatgccaatgtcagtgtagaattattctatcctcacgggttcatatcgtttgtcaagtcaccaaacactcagaaatattgatgagtcatctacctagatgtttttgttcatttgtaagactaacttgtacagagttttgagttttcttaagattttagagatataaataaaccatcaattaaggatttagaattcactaaaaataaaagctttaaaaggttgtgatttgaaagatatgcttagtgctggaaggtgtttaagggtcaactattctgacttagaggaagataaagcaagtagtaggtaagggatttgccaaaaaattacatagctggttaatatcaatgctgagattgaaactcaagtccactgcctgctggacggggaatgtttcaaaggtgcttgataccaaagcataggtcctaagtcctcatcatcctgtatgaagcatgcacatgatgccacatggtagctgaggccatgctctgaaggatgtctacatgaaacaaccatgaaaaatcatataatatgggttacattcccaacccacatcttctcaaattcactagaaggtgtccattttgttgacaaaactgaatttgaagtatatgcaataaatgacaccaacattatttttatggctaaaagtacttgaagagcacgcttcctgtttttaatcactagcgttcctttagctgcagtcagccatatttgttgcttacattataagcatatgtttgtttggtttgctctaattctttgccctcttaagggaaaagcaagggaggtttatgaagggccttaaaatgagagaaactaattaattgctgactttttatatttatcagcaaaggaaaacatttctctactctcataacgcttctgacaccaaatgtgcggattttctacacattacaattctcataccaactaggtgtcctataatttaattcagttctggctctggagttagcacagaccccacagtttaaggaatcagtcccacagactgctccacttcagatggtgatcataagcctgggctccctatacttcttactgacaggctataaatcagaggtttctcacgattccctcaagttcaataatttgttagaatggctcacaggactcaggaagacacttgactcaccattgtcagttgattataaagcacacaactcagaaacagccaaatgaaagaacggggtatgtgggaagggccgtggggaatccacgtcctcgctgggctcgccaccctccccgcacctccatgtgttcaccaacctagcagctcttggaacccctttatttggagtttttgtgggggttccattacataggtgtgattgatgacatcattggccactggtgactggactcatctccaacccctctccccatcctggaggagggagagtggagctgaaaattccaaccttttagtcacatggttggttcctctggcaaggggctcccatcctctgagtcaccttattaacgtaaactcgggtatgcttgaaaggggcttattaagagtaacagaagatgctcttctcacccctatcactcggataattccaagagtttcagaagctcttctgtcatgaacagaaaaattctcctgtcaccccatcacttagaaatttacatgagtttgctgggcgcggtatctcacgcctgtaatcccagcactttgggaggccgacacaggcggatcatgaggtcaggagatcgagaccatcctggctaacacggtgaaaccccgtctctactaaaaatacaaaaaaattagccgggcgtggtggcgggagcctgtagtcccagctactcatgaggctgaggcaggagaatggtgtgaacccgggaggcggagcttgcagtgagccgagattgcgccactgcactccagcctgggtgagagagtgagactccgtctcaaaaaaaaaaaaagaaatgtacatgagttttgtgtcaggaaccagggcagaggccaaatgtatattggtattaagtcacaatcaatacgtactttttaaaaatgtaaatttatgtataaatgaaaataactacatttcttgctttcacaaaccttgttgtcaatgtggaatgatttctcaccagtttaaacacagttgagttcttacataaggaaaaatgggaagcagaggttaaaacatgtatattaactgtggtgttctgagtgtagactctggagttcaactatccaggtttgacttcttccatttctgagctatgaggtctcaggcaagctacttgccttctctttactttagcatttcatctataaatttagtatgtcacaggcacctaacttttagcattgttgggagattgagatggtgcatgtcaaatgcctgccatgacaccttctcagagctggtactcaataacagtattaaacattttgtctgggcacagtggctcatgcctgtaatcccagcactttgccaggctgacgccagaggatcacttcaggccaggagttcaagccagcctgggaaacatagggagagcgtgtcttaaaaaaaaaaaaaaaaaaaaaaaagtctatctcctgttcccatgttttcattcattttttaagtaatttttttttaattatggcaatttttttaagtaaaaaaaaaaaaaaacaaaagccaggcacagtggctcacatctgtagtcctagcttcccaggaggctgaggcaggaggatcacttgagcctaggaattcaaggccagcctgggcaacatagtgagaccccatccttaaaaatatatttttttaatgtatggagtacctaccaagtcccaggcactactgtaggcactgaaggcacagaattgatagatgaggtccttattctagtagaactatgaaaattttcttattcagaataaaatttaggaagcaaccagaaaacacatatagacactgtcatgccaggcccctattgattccaacagggatggctcggtaagagacccggagccagtgaatgagacatagggtttatagaagacttatatacagagcattctcggaatgggaggctggataggaaaaccactaccatttgtaaaaagcatgcatattatatagcatgttcacttagcaatcttcaccaagcaaccttcctttaacccaaaacaaaaggcccctgatccctgtatagtctgcattccaaatgataggccaggggttcagatgttcttcatagatgaggagtgaatctccagcttgaccactcctggattcttctcagggtatgcttgagttattgctgttaggtgcatctgccatacagacccatagcatgattttctctaagaagctttgtgatgcatattggtaaacgttgtaaagttttaagtggacttcaattaatttttaaaaagtaaacatacatgaataaatatcatccctcccacatagctttaaattacttctgatatgtccccgatttaaaaaaacaaagggtcagtcaggtgtggtggcttacacctggcgtgtaatccagtgctttgggaggatgaggtgggaagatcgcttgaggctatgagttcaagactagtctgggcaacataacaagacccccatctcttaaaaaaaaaaaattagctgggtgtgatgacacatgcacatgcctgtaatcccagctacttgggaggctgagctgggaggatcacttcagcccaggagttcgagactgcagtgagctatgaatgtaccactgcactctagcctgagcaacagagtgagaccctgtttcttaaaaaaaaaaaaaaaaaaaaaatccaccaagcaaaccagcaaaaagttaataatctagggctttacctacctggtacgaaataaaggaagcataatagagaaagttctcagaactggctgtgcccctggttccgggtgggcaaactccctattacttatataaccttcctcacttgcttgagagaagggagttgctgggagttcttgttagaggttttgcagaaattgcccacagctgagagtttctaatttagagtcattgttccagtgaatggaaatgagctgaaggaacagccgtgacactcactttcagctaagcaaggagacctgccctgggaacaggcggagtgaaaagcccagtcctgagcattacccagctcctttgaccttttctctccagagctacatctctctttccttcccttctcctgcatcacaaaaaaacctgttaaaagttatccatctttcttctttgagcatgagagtccatacaaacacttccatttcatgtatacccaaattccaagtgatcctgaaggaacatttaaagttgaagttttttgttttgttttgtttttctgagatagagtctcaatctgttgcctaggctggagtgcagtcacacaatctcagctcaccacaacctccgcctcacaggttcaagtgattctcctgcctcagcctcccaagtagctgggactacaggtgcgtgtgccaccatgcctggctaatttttgtatttttagtagagatgaggtttcactatgttggccaggctagtctcaaactcctgacctcctgatctgcccgcctcggcctcccaaagtgctgggattacagggatgaaccacggcgcccagcaaactcatgtaaagttgaagtttaagtggcagagagaatgctgtgctgatgaaatttggataattatataactaatttctggcaacattgtaatatgatgccagggtgtcttcttttcttttatatagacaaaatatattgttgagatttttaaataagtattaacgaaatagaaagaatagtcttcagagaaaaactcttttaacgtaaccttttttttttaaccacttccatgagaaattgtcagggttgtcaacatcatgcttcatggcttttgaaatctggactttaacacaaaatccctttatacatactggaaattattgtgctttttggataagattgaggtcttattcaaaattcttacaatcatagaaacagataacacactatcattatctgtgacaagaggataggaatgggaaggataattaaaatgctagcattgggtctttcaaattatgttctctgaatcttagcacagaaataaaatattagaattttaacctctaagatatatttttaaagtttttggctgggtgttgtggctcaggcctataatcccagcactttgggaagccaaggtgggtagatcacttgagtccaagagtttgagaccagcctgggcaacatagagagaactcagctctagaaaagataagagatgagatgggaagatcgcttgaggccaggagattgaggctgcagtgagccatgatcatgccactgcactcccacctgggtgacagagtgagaccctgactcaaaaaaataaaaaaaaaaagtaaagtttctattggagtaagtcattcagtgtctcaaacttttgttttaatgccataattcaactttaatggctctttgtagactaaaattaatatctgcagaaaatagccatttaaaataacttactatttatagaaaaataacataaggcacttgtcatttattgaaggtaatggtttactctgaaatttgtacagtgaggattggaatttttatttgtatttatttaaaacatacttattttgttctagggatgctctttataggtgataactcattcaatcatcattacctatgagaaaggtattattattatttttttactttacagttaagaaagatcaggaactcagaaaggttaaataacttgtcaagttgcacaactgataagtaggtagaaccgggacttaattccaggccatctggccctcagagttcctgcttatgcccccatgcactggtgcctcttgcagcacgtcaaagagtttaccaagacgaatgagctcagaaatttgaacatctaaccagccatctgtctgcccttctggcccttccaggatatcaatgtttcttataaaatggacataaattcctgatgagacaagatttgtatggagagccatgggactatcacccctattctagacacataataaagcaacagaagaaggccacattctcgttaagtgagagcataatgagagcagcagcatagctgctcttttttacaagcagctatgaagctgtaatcctacgcaccttcaacccgtctccccatgagatcagaccatcaattgtggtctcagcaaaaacaacacatctaaatgagaaaaaaaatcagaaaaggtttaacaggctggatatggtgggtcatgcctataatcccagcactttgggaggctgaggcgggtcgatcacttgaggttaggagttcgagaccagcctggccaacatggtgaaaccttgtctctatcaaaaatacaaaaattagctgggtgtggtggcatgtgcctgtaatcccagctactcaggaggctgaggcaggtgaattgcttgaactcaggaggtggaggttgcagtgaccaagattgtaccactgcactctagcctgggcaacagagtgagcctctgtctccaaaaaacaagataataataaaataaaataataaaagaaaaggtttaacaaagggactctctggaggaggagatttatgtagagggactgtgacctttcagttgaagacagacctccaatagagagggctgagggaataagtacccagagtgctctcttttctcttcctccactctcctgaggggactcttccttggcctactggataccagagggtgagggacaccattgatgaaatccataaagatcagcctccagccatggagcagggtgaaaaatggggatcgaactgagtggaccaaagacagatatttgacacagttttacaaatcctatatttcacacacacacacacacacacacacgcacgcacaccttccttcagaacaagtgtttctattcttccactgaaaattttaaatctttgttcattaactcaggttcttcaataccttagaaagattctaaatgtatcttgtcttttttggcacattgctcaagcctgttaaggtcttcttgaattctggttccatcattcaacacagtggtcctcaagtctagtagtagcatctcagaatatgctggaaaggtctttagagtactaatttttcaggctaccccagagacttagtgaatctcaggtaaggctcaggaatgcctatgtgtttgttgttgtatttagtttcccaggcaaccctaatgtagccagtgaaaactcaggcatctgggatcccttgatataaccacttcaacacaaggcatgtgctggacacctttttagaatttatctttgtccagaaacgcagagatcttccactgggactagatttgggagtgtagactggaatgctggaattgcctagggaacttttctgaacttcatcacctcttcctgggtggccaagcctccttctggaatcctctcactaccacagtgaactgctatcattgaagggagcacgttaaatccttccagtcttctagtgcaaaaatgttctaagactcctagatttaccagtaatcttctttacaaatgattgtttgacttttgcattaattttactatttgtattttctctgtgttgtgctaagaatattataatagactctgaaaatattttactggatttgaatcatgtccatcaaacctattcacccatccttccttcttttcttttttccataagtactaattgttctaggagccaagcacattccaggccttaggaataccataaggtacaagacagctgaggtctttgccctcttgtgcttacatttcagtgggggatgcagactttcaaaaagtaaataaaacatctgcaaaaaaaatgttaatatgagtatgtggtataaagaaaacaaatggtactgagcatggagacaattgcagggagggcctctcgaagggtaacataggagttgaaaactgaaggtcaagaaggagccagccttgcagagatctgggagaagagcatttgaggcagaaggaacaagtgaaaatgccctgagataagaaagaaactttagaattcaagtaatacagtgaggtcatttcagagtgacttgtccttattgattgtgtgctgaccagcaaagagatatttccatctgctctaggtcccataaactacctcttcaaatacctgctgaaaatgtttctatgtccccacaagcttttagccagcccatctttatatatgcctataatggattagaataaaataaatacatgaaaactgctgataaaccaaagctttactagtaaatctttgtagctctctctcctccaggagctgatccaggttatatgggatctgaagcttttacaattttaaaggtcctttccaaaaaaaaaaaatgcaaataaaatgttgcaatggccccactcatgcatgtgaagggcccagaaacttcaggctaattggctccatggtaaattcacctgtgcctggcacttgtctttagataagagactgagaatgaccaaaaatcaaaatccacaaagttgtaagtaggaggcaatgaaaaagcatgtatttctgctaatagccagagaaaccatgctcttctccatgtcagctgatgaggagagggagaggaaaacttgtttagatttaactatgcagttattatggcaatcactaagttaggagcaggagaaaataaacaaaagaaaaagaaggagcttgttattttgtaaggaagctgctaaaggaagctttaggcaagtaaaggaaggtaggttaggtaaatacattggaaacaatgtggaatggagactgctgaaagaggtagaggtagaagaaggtggtcgggaccaagccagtgtgggaggtcaggagagtgtggaggttgttttggtggatgcagaggagtaggactctgacatggaaaggtggaggtaggggtggaggtagcgtaggccgagatgggaaggtctgggagtgtgagtggaggcagttggtgaaggcagtagaagaggtggtagggggtgagtgtgcaggcagaggaggaaaggtagtggtggtggtggttgtagggcagagtttggttccatttgggcctgtggagatccattcttcttgccttgtgtgaaaggttttttttcataattacttctgagtctcaaaaaatattcttgtgaataatggagaatcagtcatcttttacattatcaaaacaaagacttatcttatcacaaaatgctcagactgtggtccagtttgggtccagtattttgacatttgctttccaggcaataataatgaggtatatttatttttttgaggtaacatgtgataatgtaatacattcatgtaatttgtaaagaacaaatcagtgtaattgggatatatatatgtatatataatcttaaatatttgtctttttaatgctagaaacattcaaattattcttttaactattttgaaatatacaatagattattgtaaattatggtcaccctgttgatctatgaaacacaaggtcttatttcttctatgaaactgtatatttgtacccattaatcaggctctattcatcctcccacccccttacccttcctagcctctagtaaccaccaatctactctatctttatgcagtccactttttaggtcccatgtacgattgatgtgatatttgtctttctgtgcttggcttatttcacttaacacaataaccaccagttccatccatgttgctgcagataacaagtttttttttttttttttttcattcttttttattggatgactcatgttcaattgcatacatataccatattttctttatccagtcattcattgatggatactttggttgattccatattttggctcttgtgaatactgctgcaatgaacgtgggagtgcagatacctctttattttattgatttcctttcttttggatatatacccagtattggaattactgaatcacatagtggttctattgttagttttttcaggaacctccatattactttccagagtggctgtaccgatttacatttctgccaacaatgtataagggtttccctttctttagatccttgtcagcatctattatccttgtctttttgataacagccattttaactggggtgagaggatatctcattgtggttttgatttttatttctctgatgattagtcatattgaacatttgaaaagtgctcgattgtgaccttgaataaaacctaaaccaggctgggcacagtggctcacacctgtaattccagcattttgggaggccgagatgggccaatcacttgaggccaggagttcaagaccagcctggccaatatggtaaaacctcagctctactaaaaaaacaaaaattagccaggcttgatggcaggtgcctgtaatcccagctactaaggaggctggggcgggaggatcacctgagcccaagaggcggagtttgcagtgagccaagatcatgccactgcactccagcgtgggtgactgtctcaaaacaaaacaaaacaaaacaaaacctaaaccaaacagaatttgtggtcagggagagagatttcttctggaaaatattcttccttccatgatttgtaacaaatcaaatggccatttatgtgtcttcttttgagaagtgtctattcagatatttttttcattgttaaatcagattttttttttttttttttttttactattgagttgtttgagcttcttacatactctggttatcaatcccttgtcaaagggatactctgcacatatttctcccatgctatggactccaacttctctttggggttgtttcctttgctgtgcagaatctttagcttgacgtaatctcatttaccaagttttgcttttgctgcctctgcttttgaaatcttatgcaaaaagtctttgctttggcctggagcatctccccaaagttttcttctagtacttttatagtttcaggtcttatatttaagtctgtaatccatttgatttgatttttatatatggtgagagatagggatctagtttcatttttctacaaatggttacccaattttcctagcaccttcattgaagagactcctttcctcattgtatgttcttggtggctttgtcaaaaatgagttggctataaatgtgcagattcatatctgggctttctattctgttccattgtactatgtgtctctttttgtcccagcatcatgctgatttggttactatagctctgcagtatattttaaagttgggtagtgtgatgcttccagcattgttctttttgctcaggattactttggctatttggggtgttttgtggttccatatcaattttaggattgctttttctatatctgtgaaaatgccatggtattttgatagggattgcattgaatctgtaaaattgctttggataatattatcattttagctatattaattcttccaatccatgagcattaattatttttatatttaattctttcccttttttggtgttctctacaatttctttcatcagtgttttatagttttctttgtatagatctttcacttctttgattaaattgattcctaagtattttatattctttgtagctattatagatgggattacattcatgaattttttcagattattcactgctggtatatataaatgctgataatttttatgtgttgattttttatcctacaactttacggaatttgtttatcagttctaacagttttttggtagaatcttaaggttttcctaagtacaagatcatgtcgtctgtatataggaaatcctaaatcaaaaacctaaacctgaacaaggctaatttgacttttttctttccagtttggagcctgggcaacatatggaaaccctcatctctgcaaaaaaaaaaaaaaaaaaaaaaaaaaaattaaaaagttagctgggtgtggtggcacatgcctgtagtcccaactagtccagaagctaagttgggaggaacacctgagcccaggaggtgaaggctgcagcgagaggtgatcgcaccactgcactactgcctgagcaacagagtgacaccctgtctcaaaaacaaaacaaaacaatcatacacgcaaacacaaaccaatctggatgtcttttatttctttatcttgcccaagtgctttggccatgacttctagtattattttgaataaaagtagtaaaagtgagcatccttgtcttgttctagatcttagaggaaaggcattcaatttttccatgttcagtacaatggtagctgtgggttttgtcatatagcctttattattttgaggtatgttccttctgtatgcagtttttggagcattttatcataaaaggatgttgaattttctaaaatgctttttcagcatgtatcaaaatgatcatttttttcccttggtgctgttaatgtgatatatcatgtttattgatttttgtgtgttgaaccatacctgcatccctgggatgaattccacctgatcttggtgaattatcttttcaatgtgttgtaaaatttggtttgcttgtattctgttgagaatttttgtatctatgttaatcagtgacattggcctgtagttttctttgtttgttgtgtctttgcctggttttggtatcaagttaatgctatccttgtagaaggagtttggatatattccctcttctttaatttttttgaagaatttgagtagaattagtgttagttctttacatgtttgttagaattcagctgtgaagccatcagatcctgggcttttctttgataggagatttttattacagcttcagtctcattactcattattagtttgttgaggttttttatttcttcatagttcaattttagtagattgtatgtgtctagggatttatccatttcttctaggttttccaatttgttggggtatagtttgtagtaatccataataattctgtagtctcagttgctatgtctcctttttcctttatgattttatttattgggtcttctctctttttttcttagtacagagcagagtttcctggggaggggttggtagtcctgcctcacctctttttctctggctgccctctggggtatttcttcctccaggcactactgatgcttcctgtggcttgaaacagggacaggtctcctgctagggaacccaatatggtaaggaagttggttgtcctccttgatctcacttttcccagtgtagaaactgtgaattagtggaaaatttctgcacacttgatgccaggcagatggtgggaagaggtgtcacagatatgtaagtccaattctcttactgtcatcttggagttttttcacttctctgtagccctggaaactgtctcctcatattttagttctagggtattgctggtaaaaaactaggtgctatatatttggttttgtttttctattgggggaaatgaagccaccttgtttctaagccgcattttagaaccagatgtcaaagaactttttagttagcatcaagattctgaatttctttctctctctcttttttttttcttttttgtttgtcagggtctcactgtatcactcaggctggaatgtagtggtgcgaccatggctcactgcagcctcgactgcctgggtttcagcaatccttccatctcagcctccttagtatttgggaccactgacgtgtgccaccatgcccggctattttttttttttttctttttagtatttttgctacaggtggggtttcgccgtgttgttcaggctggtctcaaacacctgaactcaagcaaccaacctgcctcagcatcccgaagtgctgggattacaggtgcatgcccctgcacccagccaacattctgatcttctgtagacactctaacaatgtgttgctttttcttgcttttaaaacctgccaggtggtcacttattatctatcattaaatatctgatatcaatcattttgtgcttttaaaatatgttcctcatatatattaaatgtcatatatgaattaaagttacttttcttaaaagtcaacttgttaggacatatatgtaattctgaaatagaataataattgctgccctccttctcctcctccttcttttcttcctgttctttctccttatcctcctttttttttctccttctccttcttcttctcctcttcctcctttctcctcctcctcttcctcctttctcctcctcctttttcttcttcagatatttgggtgtgctccacggtgtatcaccttaataaaacctaaaccaaacagaatttgcggtcagcaagaaatttcttttagaaaatattctttctttcaggatacgtaacaaatcaagtggctgcaaagccattgtgtgggtcagcattggtgacagcttcatgaatgttaacgttgaatgtcacatgtcagctgaaaatcatcataagcccctgaacatgatttttaaaaggcttatggtatgctcaggcatgacttcggactgaatgtcacgtcttagatttatgcatatgagcctaaaagcctaaatttttaaaaagagcagaaaactattttatgtgtttgtttctgaatactcaagtgccttgctttatctttccactgtgccttctatcctgactactttaactgataaaataatttgcaaagacggacagccatttccttgccagggtacattccagtgtgggagatttctaaatgctaattaattccaacctcaactattttacctgctgtttcaaaggctggcagcttgtattcatcacctgaatgacagctgtttctaacctcttttccctgaaaagaaataagaaattaaataaaccttttgcatgctaatcactgatattctgaactgacagttgaaaagtgttcaagtgtgagtcaaaggcagacttgaattgaaagactttgtctgcaccaactagttgttgaattttgaccagatatttgcgaagtgtagagagacagggttgcaggcaactgatgagacagtgttatcataagtgagagaataattagaagagactttaagtatgttaaatgtctacatttaagcaagttgagcaacataccttttttatttaagttttatagtacagatttttttttttcattttttacctagtgaattttcttccaggtcaatggacagatagaaaaagcaaggctttttaattttttaaaattttgtttacatgctatttttactttaaagtttattaagtctaattaattgtctcataataatggttgatatattgcttcccaaccagagctatcctttgtcaagatgtattttatttctactgtagttttaatttctgctttttacaataatggttggagttaagagcatttgactgattccccctaaacaaagtaaattttatgttaggaccatcttcttatatagtaaacatgcacagacagttttggaaaggattatttaatcttcatggaggattaacatttaaataccaatagtagattatgcttcttgatttgtttaaaggtatctaccactgaatgttttctcctgcatgttcctgactttctataagaccccagatagtatcgttcagtcagaagttgtagatctctcagagttcatgtatttcattaattcaagttgctttgatgatgcctacttttgttacaagaggatatgtttctttttattgttgtcttaaggttatcaccattcagtaattttactatcatatggtaaaatctgaccttccggtgctcttccctatgaattttaacagtcgtatacatttctgtaattagtcactatcacaatcagaatatagaacagttttatcattccccaaaacacttttgtgctatccctttatttacacctgctctccttacccctaactcctgagaaggtatttttgtgatgttaaaatataaagaagaatgagaaagtggaagaggaagaagaagaaggagcaggaagaagaaaggaagggagaggagggctggggaaggcaaggagagtgaagaaaggaaaactgggcgtgcaacccagtgaaatgttcattgaattcttatcaaagattgtatgtgttacctgggacagtatcttcaacacattgcattctcctttcttcatgtaagaagatgaaattgttcaaatgctttctgcagtcattctctaaattggaaattgtatactgtgccttgaaagtggaattatccccaatgataacttttctcatccggtactgtcagtactaggcttgtctgctgtcaatttgacatcatcccatctctgggatgcaatgaaaaggagaaaccaagaagcacataccccagagtcctcttttcttaatagttctgattccagattcccagtgaagggaatgcgtacaggatctgggaggcagaagagaagtggagtctgttgcagctgaatgtgtgggcagatgtgggattcctggtggcttgagaaccactcacttcactgctgcagacagtaatcactggtgggatctttccagggaatttccaggacaccttgcccataagccactgagaaccaccagtctggtgttgctctaggatgaggtttctgggtctgccttctcacccttctgcctgcccgtcccacaacttccaccatgacttttctgtcctttatccactctggctcacctatcatttgtggaaacgccaattcctgcattcaacttgctatttctggtgtctcttcaagtgacttggttttcctgcacaaatccagcctactaaaccatgatttaaagaaaagtttagtatttgtggccagcgtttaaaaattggaagatttctctttgaagtcctaatggctacttttcttttctttctttcttttttttttcttttttttggagactgagtctcgctctactgcccaggctggagtgcagtgggcctgatcttggctcactgcaacctctgcctcccaggttcaagcgattctcctgcctcagcctcccaagtagctgggatttaatagagctgggttttcatcatatttgccaggctggtcctgaactcctgacctcaaataatctgcccgtcttggcctcccaaagtgctgctgggatttcaggtatgagccaccatgcctggccaacttttcctttgagaaatcaagtcaggaaacactggaccagcattctggactgaagacaggggcgtcaaggttacaagtggctgtcaccttagtaagggtgtgattgtccacttcaccagccagcccacttcattgtatcatcttcttggaccttgcagcctttacatttgggtaccttccttgctaaataacatcaccttagtcttatttattaaaggattaccaattgcaaagctgttttctaggaactcctgggtatatggagatgtgtaagaagaaccgaatgcttttaaagagcttgggggaatgaactgcgggagacaaaagcaagcatgtgactgtcctgtgatagcaaagtacttgcatggaatgatcccttaaaggagggtgagaaaataaaatgagaaaataaacttagtagctcactatttgggtatttttgtatactcacatagagttttatggtggcctcacttgttattgatactctaattattgttgatgaaatttatctgcattttagtaagaatttcatataatgcaggctgtgtgaagtggcttatgcctgtaatcctagcactttgggaggccgaggtgggtggatcacctgaggtcaagagttcgacaccagcctggccaacatggtgaaaccctgtctctactaaaattagccgggcatattggcgagtgcctgtaatcccagctactggggaggctgaggcacgagaactgcttgagcccaggaggtggaggttgcagcgagccaagattgtgccattgcactccagcctgggtgacaagaacaaaactctgtctcaaaaaaaaaaaaattgtataaactggaaactcagtgaatgttgtggaataaatgcaaattaatctttttccaagtaagcaaattctcaaagtatgtttctttagaatattttttgttgatcactatctatctagttctatcacatatctgtatctaaataccaataatatatggattttaaagaagatgatatatatcagaaaaaattacacttaaaatttttccaatatgttgtatttaaataaaatacaaggggcattatcaggttaattaattgcagataaaagtaaatatagatatatatgagcctttttctttcttttttttacttttactctgcttggtgttgcataaatatgatagcatataatttttgatgcaggattttttcactttatgttgagatgttttgtatgctgaaataaaaatatgagaataagcaataattattgtaaggtcagcatctgttgattttcttttcctccaggtaaaaatagacattagtttatcagtttagagaaaagaacacaggtgcttcctagtggcaggcacctagcacactccaagtaggaattcatagatatgcctttttaaagtttatttcttttaattcactttcattccacgtgatttattttttgtggagggaagaagtagattcaattttgtattctcccccaatggctgatgaaagtatggacaatgtgtattttgctatgcatgtgaggtgtatgtgtgcatgtacaacacatacacatatatattttggtggagacacaaaggacatttatttgggcaactccaaacctgtttaagtttgatcccttccagatggccggatacctggctgtcggatccttggctcagcccatttcttatctcccaaatatccctttgtgcttctctgagaatacggcatatcttagagctggatgagtttcctgttaggacagctcacagattcgccgagcaagctggggacagtcaaagttgtcttacagaaaaggctcacatcttttaacaaatgtacgtctttgaaaagtgcattttgctctataacaatgtttctggctttgttatagaggcagaacagcaaagtgaagtgattcagaacattgggaagaccagcatgattccatttctgactccggcattggccacaggcccttgtgtatgctctgcaaactagctgagcctcagtttaccttccatacacgggggcaccagcagtacctacctcacaagggtgttgtaaagaataaatgtgataattcaagtaaaggctttagcaagatgattggttcataataagtggtaaacacatggtaactaatagtaataatattggtgctaaggcatttgtgctaagacagtggggctcaaatttgagtgtgcatcagagtcacctagagggcttattaaaacacagatggcctaccccccaccctgcagagttctgactcaggaaatctggattttgcatttctagcaagctcccagggaatgctaatgctgctggccctaaaactgcagaatgaccactgacctaaggcattcagactccagactatttcttggggcaggtgaggactgcagtttggtcatggatcagagtgaaggatcagatgtgggattacatccttcaaccttgggcaatgcttctacagccacgatcctggtagctcaatgctggcccagtgtttatcaagtacaacaaaaataggaagtcctgtatttgcttacatctaccattcaacaactcacaaaaactttctatcttgtttttcacatccttaactttcaaggagcagctccctcgcctgctccagagcaagtatttcccctccaaggcatcagaggactgtcatcagctgcctcaattctgccttcctttggcacagagcaagtatcacatcctctgtgcccccaccagctgattgcagctcctttgaggagtggagattttatttcactctggctccttttcaggagagaatcctcttccctggattttgtcagaggagggttttgggtaagctaagcaggccatgcacaaatacttgatgggagtggggaatggctgtgaaccaaatattttcatttcttcacacttaactgaaacagctgccttcaccttggtgactcatattctaatcaaatccttaactagctgtggaccctcatcaaataccatttgcttattttggctttaacagtgggtggcatctatcacttactgattgtgacagaccactgctgagttcttcacctgcaacatttccttttatctttcctaggagtctatggcctgagaagtgaggtggcaaagatgctcatacagcaactctaactgtttccagccgttctaatgccaacacagacccatctgtcttctggtcttttgctggtgccctctgtctaccaaacctgtggtactgcaagctctaaaataggcctccctgggccaagagcagggtaaagaattacagagaatcagtggtggggcagaaacagggtaggtggcagacagaagacaatgagtaacgtacctaaggaaaattttaggagacaaaggctatgtcaagtgcctagcctaatacaggactttcgctaagtaacaaaactagggtttgaagcctggatcatctgaatcaaattataatcatgccaatggagcatccctgccttttaggagcctgcaaaacaggttgacattatcacaaagcaaattgtgtgtataatcagtattgtccttacacgtatatgagtagatagaactattcaggtggggaagtgttctctcctccattctgagatattctgaaatgaaaggttaatagtcagttatttttggaaaatatgtacacttttcacttcgatatccactcagcaataagtacaaccatcagaattatgctttagcgatttggcttttctctgcccccagccatacatttaaccaagaccaaaatgttcactttagtttcagaaagattttttttctttgtagaacaaaaatgcaagtgacctaaaaagggaattgacttttaaaaataatcttcgtatatctaagtttgaaatgtttaactctaaagttcagcataggaatgatacattatcatttagtgtaagaaattcatctttaaaataagtgtgttattttagcaattgcaaagctttatctttctgaagaacaaattctccccttcagaggcagggttttagtattaaattgcctataaatgttcaaatgtgacttgcaggtcaaaaatcacagtttaagtggatttgatggattttcagacatagtttataatgtgatttcaggtcactacttgttccaattgaaacatcaagctaacagttaataaaaagtaatgcagacgcttgtccaatctgattgcctggtgaattaggctccttttggaaaatattctcatactcatggaagcaaacatgaactggctcattgacgcattcatggttttctttccatatgtttgagtgcctgctatgtgacaagcattgtgcttcaaagatgtttatattttaattttgcactttggcacaagactgatataatgggcatcattgttgagagtgtctgtcatttgaccagcacttaatgtatcttatctctaagctgtacatcaaccctattatatttttattattatttccacttcatctttgtttaactgaagctcaaagaaaccaaaaaacttgatgaacatcaccgagttagtctgtggtcaagttgtgatttcagctcaagtgcatgtcagggcaaatacaatattttttttagactatgtgtgcacttattgtcccttcttgaccatctctagggttgtctatgctgtcacctcagctgatcacttggcagtaagagacatactggctgctagtgttttaacttctgaaaaatctaattcttgaaaacgtggggccaggttgaagagacagggtctgattaaggcagatggcttctaggatgtgtgccatactggctgagttatatcattctaggctactagaatggttcatcctggggttttcagactcatgctgtcttgcagacactggttgttcattagggaccacattatacatctcaggttcaagagagatgactcttccacagatctcttctattgtgggacgtggaagtcttgcctgggtctaagggaatgaccaaattagaatagcaggattgagaagaaacaattaaatctatggtgtcatgggacttggcaggacgtaaacataggaattctagaatattttatcaaagtaagaataacctctgtaaggacaaggacctggtctcaccaatgaaccggcaagaactagagacataggcaagcccacattaggtattattttgttttgttaggtttgttgcttcagagggagattcaagcttggtgcacagaaacttcagggaaataatatcctagtttcaagcttattcctggactgcatcttggacttcagggtctccattgaagagaatacatgaaactttgggagagtaggcctctgacattcttagagttatttcctgggcctctgagatgttgcagggcttgttttagggagaatgttttagtgaaaagacttgaggtcaggatgacctgctgtgacaatcttcaaacttaggagtcgttaaaaggcttctttgttgcttggttggttgaggacttactggcctatgggatctggctttttatgcaaaatcactagggaattgcaaatttagaattagaagggggagatacttcaagtgtatcttctttcagtactgagcttaatatgtagagaaccaaggcagcccactcactaccaacaaacatcagatttctctcttgcctcagtcagtcagttgggaatgagtcttgaggaaatggattgggggattgagggttagagccatggtttactgcagtggtgtgtagtgttcatgaataggccagccctgaatgtatggtttctgtttagaagtttgtgagtaggtatcagatccccatacataacactagtgaagctgaggaacaaaaaatccagttcttacagaactggggtatcaagtaggtaactggccatggatgtaaatgcaggaagctggttatgagtaagccaagtacacagcaagacttgtgttttactcaagcatggtgactagatcccatctcaagcacctcctttgatcaatgagtaatggcttctcagagcactctattgagaagtattctgaggctccgtatcagctaagtgagaaaggatgctgtgcttgattaataatgtctgtcatagtcatgaagtaagagaggagtggtggcacctgtaccacatatttgttatccctattaagctttggaggcactgctgtaggactccgagggcatcactggccccagagactggacaaaatgaacccagataatgtgaataaagtaacccagcaacccacttctccgttgcagctgtttcaaactattcctgtatttttcaagctcatgaaactctgacaatcctccatgcttaaaagataacccctttggctttcctgaaaggaaggaagccatgtgtcatgagttaccctgtgtccctgcctccatcactcagtgtctcttatcttcccccatctttcctcccgtgtttttccatgacagaggataaagtgtcctccctccccttcagggcagcttctccattttttttttttttttccagagcttattactcatcacttaaaatagctgttgtggggaaataaggtttgcttggaaatgcattcctgatcccaagaggcctctcccataccatcctgccctcccctgtgactgtaacttaccagtgggcatgattttcacaaattactatttttctttgtttcaagttaattttgctctgtcatcaagctatcagattacagctctaattctaactaattgtgcatggaatttgcatgattttgtaaaatacagacaaaggaaagtggaaattcggcttcctggttcccaccccttgctgagcatgtctcacataggcctgatgctgtttaattacatgagttggagttcatggtcaagtgtaaagaatgtgggtataatgttgccatctaatagttcaaaggaaatacagcttagatctgttattaaaattgtgttctgatgtatttgaagtgttaacatctatgctgagaacgaggtcttgaatattatattttcagtttatatttgaagttgagattttggattgtgtttacgttttctgaacttgctttcttccttagttgaccttatgcagggaacaacttattaatatttaagtactaatcccagtactgccttccatcaaaagcaacccacatatctcattagcaactcacattagtattgattaaaaaattttcttgcttacttttataatctttatttagctgagttgtacagtatttgtgatatttctatcatcatatatcatcagtggaaatatatttttttcatattttatatgtatacatgcattagtttttatactgtaagttgctcacctgaaagtggtttttaaaaatcataagtattcacaaagagggaagtaaaaggttcaatatctaaaatcatcctttttaaaggaacatgacattctcctaaaacaatagaaagtatactcattgcatatttctttaagacagggaaaaggaaacagttctgttttttaaagatgtggagagagacagggagcaagaaagaacagagccaaaaactacttctatttttaagaaaagagggagaaattgaatatgctttttacaaggagaagacacagtatacagtggtatgtgtcagactttcagtaaaagcaagcttctttactcatatctaataaataatagaccagaaaaaaaagggcctggtcatcttattttataatgaaatgataaaatgcagataaactgaacctctgagtcaaaaatgtattgggttcaaaggccatttttaggatagctttgacctttccataaagtgtgaaaggttcctgtctcccataaagttgtgaccttaaagagcaagatgtattcattgtgtttttaattttttatttatttatttatgtttgagacaggagtctctctctgtcgcccaggttggagtgcagtggtgtgatctcggctcactgcaaactccgcctcctgggttcacgccattctcctgtctcagcctaccgagtagctgggactacaggcgcctgccaccacgcccagctaattttttgtatttttggtagagatggggtttcacgtgttagccaggatggtctcgatctcctgacctcatggtccgcccacctcggcctcccaaagttcagggattacaggcgtaagccaccgtgcccggcctcattgtttaaaaaagttataaaagaaatagagagtgctctgacccatcagatgtgtagttgtggtgtctgtcacacagaattctgtcaagaaaatagctagcgagtcttgaacataaggcattctgaggccaacatccccttttgatttctaaaggacttattgttacttctggttttacaaattgcaaattagggtcttaaaaattttagtatttgatgttagttcactgaactctcttgtcagccaattcataaggagaatttactgcctaccatgtatctgacaatgaaatggagaaccggtagaaacagcccttagtctcagtgttgagatgagtgagtgttcatttagaatgcatttcaccagtacttcttcagtttgattgttaacccatttggtttctaagtcttaggagatatgcaaatgctgaagtcctcaatgttctaatgcggtaaatagatttttttttctttgttgttatgtgagacaccttaagtatagattggtgttaaaacaagtttataataatgctattgatgtgtaaaaacaagctttctaaatgaaaatcaatacctgggacagcttataaactattcttcataatccctttgggtggaattcacagagtggttgtttctttttggtttaaatgctaaatctggccatctttggttatcaaatggaatttgatgatccaaaatgtatttaccacatttgttggatctacttatgaatctttggaaaaactaattgtagtaaaatgggaaaaggctgggacttgtcatctgggtgaacctgaacacggtaaaacctccctgtagaaaacctaatatttgtaatctgtaaaatggaattgaaattatatatatatttaaatatataaattatatataattattattatataattaatattatataattatatataatataaattataaataaattataaatatataaatgtataaattataaattatatataataattatatagttattatatataatttatataaatacaaatatataatatatataatttaggtaaatatacatataatatatttatatttatataaaattataaataaattataaatatataaatgtataaatatataaattataaattataaatatataaataaattttatataacataaattataaatatataaatatataaataaattttatataatataaattataaatatattatatataatttatattatatgtaattaaatatattatataattatttaattatatattatatataatttatattttatataattaaatatattatatatttaattatataagtatattatatataatttatattttatataattaaatatattaaatatattatatatttatatttatattatatattatatatttatattatatataatttatattatatataattaaatatattaaatatttaatgtattaaatatattaaatataatttatattatatataacttatatattataatttataaattatattatatgtactttatataatttatataatataatatataatttatataatatatcatttacataatataatttatataatatataatttttattatatataatttatataatataatataatttttattatatatagtttatataatataatataatttttattatatataatttatataacatatactatataatttttattatatatatgctgtatataactatagttataatttccatcagttttgcccttctcttcttctccatgtttaatgttccatggtctacacacctcattgccctccacacaagttagtgttatcgtatattgcgatatgtctgccatcaagtgtgtattcatgatatatccaaggtagaaggcatgtttttctttttccaggcctgtgtggccaagaagcatttctgaatcatgtgaattcattctgcaacctcatctaccagtgttcacccttcccccactactgccctgaaatttcaccattttaagtttattgctttttgtcttgtagtttctaactctgcgaccagcgctcccccacccccagccctgcaactgcaatgcattatgatttcttttaaatttgtttcaatgcctgagcttggggccccaaaactatagactggactcttacagagctgaaggagagagggggaagcgaaggagttcatctgggataaataaaagaaaggaatgtcagggaaggagaaggacccacaatcactatctcacagatttacgtggatgttttacaatgagattaaccatatttagaatcctagacattttatttttgcaatcagtttttctgaaaagaaagaattcttactgtttagctgaaatacagcttttagctgttttttttttttgtaattcagtaacttatgtgatgtttttattgatttccattatctctcattgtttttaacctagtactaaatggaaaacctaggctagcatttatttgtacaacttagtgcatggtttaaggaaaaaggggaaaaaagccttgtttacttgccctataacctagtgcttacctctgaggtttatttaacatggcaggtggtgacgaactgcagcttatgacatctcttgcaatgtaattcaccactcaatgacgaatgcttctgacaaatggaaacctggtattattctaaaacagaaaaaagatcaatatcatttggatatgggatagtaaaaatggcttctctaaacacgtgaaataaattagccctttaaggtgagaccatattataagtggcaaagataaaatagagtggaatttttgttttccttagaatttttttcttgtcagttgtcagagtaaattaatactcttagaagcagtcctattaccatgccaccctgtgctgttgtttttttagtagtttgcattgttagtgctaattaaaaaactatcttggaagttaattgggggtgatactagttagttgtgactgaggacataaccatgttaattatcgattgtaggtcagacaaagggctaggcttttctacctcttgaatcttaactaaggtcatgagtaagttgtttttaaatcataaaattttagtgttagacaattgctagaggacaagcgtaacttcacatttaattagggggcagttggagatgttagtggtgtgttgttgggcagttgccacacgcttctgatgatgtagtaaatcagcagtgaaattaggtgagactcactacatgaatacacgtttatgtaacagtttttctcagacttcggtcacatgccaccttcaagatatttcctgcctgcaccattacttatttgatattttcctctaagctaattacagtgttactttatttgtacttatctttgacaataagcaataatactcataaattcagagactgattttttaaaattatacattaaaaacacattatcaatgattttttttagtatatgtgctgctgaagtgagcacacaatttttttttaatttagcttttttaatgtaaaaaagaacttggaccacttttaaatacctcacattttaggatacatttatatgatctatatatatgccattcattttcataatttcttagttttttttgtagttttagaaacattgattttccccacatttgtggaaattggaactgtgtttatgtatatgtaatactgaaaaggagacgaaaagaaaacacgtttcacagagttacttcttggtctgttctggaattataatagcgagtactaataagaacaggcacactttgggacattgtatggaagaggcttctagtggcaaagtgatgagaggcagagctgggagcaggaccagttcaccagccacagcccattccagagagtcatagatggcaaaatagcagctctaatcgattggtaatggctgatggctgtttctgttgagaactctgaggcttagtctgggctcagcagggaggagtgcagtgctgatagtgatgtctgacccaggctggaaataggcaggaatagcgagaatgccagggatttgccatgtctctactgtgggacagaaccagtgtgtagcacttctctgggtatcgttttacatagaaataaatgtattttaaattgttttgtttttggagcattggatttgtcatctacttaatatctccatccttgttattttttactttggtgtgtaattttattgtactatgcatctaatatcaatcatcataaaagttttatttttcaattacttttttataatagaagttatattggctcatcctttgcttttctctgaccatattctattaggttggtgcaaaaataattgcggtttttgccaacctaataatatccactcttgtctagtgctatttgcaaggcttatccagcctcaaactgaattccacaaagtggttttggactaactagacctctctggagtctcttgttgaagttgaagttgaattcactcacttatatttgtctgtttctaatgtgtatgtattaccttctgtatttccacactcacatcagtcagaatgcaaaggatgcaacaaatttatgtggtattaatcagtatttttctataaatgacatcagaaatgtaagcggatggtttataaataactaggactatcttttaagagtgggagcttcttgacattggctcaggacaatttccagaaaggtccagattttcaaacatacaaataagaatgtttcctttccgttcagatttcttcttcttgtcctgcttccagagatagatgagaagacaaagggttgaactggcagattctactctagtttaaatgggggcaccaagatttgcatttttaaaacaagtcctggcactcccatccaggcttattcctgtccaagggccaaggttgttttctttggcactgcattcacccttagagcttctggaagatccgctgattagcccggttctactcttgcatgttccccatgtccagattctatccctcaggtaccccaaatcagtatgtaacctattcctaatcagaaatctcaagctttgccctgtaggccatttctcctgatttttccatgctcattctaaacagcagtagttctcacatttaagcatgcatcagagtcacctatagggcttgttaaaacacagataactgggccccacccttagatttcagatcaggtaggcttggggtggggcttgaaaatttgcatttctaacacactcccaggttgttgatgctgctagtctggggaccatacctaagaacactgcaaaatgtttcttttcttcatttcaagccccaccaaactgagactgattatgtaggtgttggcctagttgccctctaaatgatctttatttatctaaatagctgcttgcaacatgtaaaaattcaaaaggtgaaaagtatataagaattttcagcagggattcttctggtgcccctgaattctttttgttgttgttgttggtttgtttgtttgtttgagacggagtttcgctcttgttgcccaggctggagtgcagtagcgcaatctcggctcactgcaacctccacctctagggttcaagagattctcctgcctcagcctcctgagtagctaggattacaggcatgtgccaccatgcctggccaattttgtatttttagtagagacgggtttcgccatgttggtcaggcttgtcttgaactcttgacctcaggtgatccacccacctcagccccacaaagtgctgggattacaggcatgagccgccgcacccaactgtccctgaattcttcccaccattcctgccagctcctctttcccatccagtcctctgtcccactacctttatttcttctttttccctccctccccaaatacaagcaaaccaaccaacaaaaacccagaacacacataggctggaacacaaggggataacatgccttgaattgcaatgccataaagatgtacaactctagggacgggatggcgtccacacagaagcaatgtgaacaatgccccctggagttgtacaacgtggggccttgttgagcagtactgtttcgcaacacatagtagcaagaatcctctttgtaagccctattccatctgcctggttggttttggcaggatggctgactaacccactagtgggaatccacagctaggatagaccctccagctctttggctggcttctaaaaggccacgactttagaaaacccatctgtaatacctgatttaccacaagaggtagccttaggcctagatcagtctagacacttgtcagcagccccaccttcagtgagaaggactcagaaaacactgtctcattggtttactcatggggaatcttcctggtcccacccaaggaaatgcctcctgtacaaattctcttcccaaagagactaacagcaagagaatcccagaaggggtcaaaactcaaggggtcatattcctgattccttatattcctgattcagtttaaatcaacccctcaatttacacatcaatctgtctaatccctctacagccctttggctcttctccacacccttggctgggaaactttcttcttccctcctcagccagttcacacccttcattattcagcacatgttgaaatgagcatcatcggagctaccactccctggatgcttcgtcatatcactgggagagaaggtggagaatgttcccccagcagaaagctcccacaccatcctgtgtgcagacttcccagggggaggtctgtgctgtatatcttgttttgaaatgtaatgacttagtattttccactgaattcccttgcctggtcagcttccacagcatatctgtgctatagacaataatgaaaagagggttttcgtatgttttttcttttattatatggaggattaatatgctgcaatgcatctaccatattgtgtgcctttttcacaaacatttttattagaaagatcaattctcagcctagatccaactatgatacttttaaaatcctgtcattatctcccctctgctaacgaattcaggggaagaacaggtttctggtttctcattatttctaggggtagaattccacatcaaatatagaaaagcatcttatacatggaacttttttttttcctttggaaggggggcttcttctgtgacactatccacacacttttttagtgacttctttttcatcaattaattcagattgtctgaagactagaaattggggctttggcaagggtgaacagcgattaaaatatatatctccgctcacatttctgcccacatggttctttttctgagagagtggttaggaacagtgctagtcttgctaaaactgctgagtttcatttcacactaataacacctggcatctttatgtgctaaggataaattaagcactcagtgaacacagggtagacatgggttttgctatgatgtagcttattctgcactcattatatagagagagaaatctgtgttgtgaaaatgtgtgtgtaggcatgtatgcaacattgcaaaaaatattaatagctctggccattttgctgattttagataaaggtagcactatcatatattccgattagttattaatagaaatactgagaatattagaggtgaaatggcccttaaaaatcatgtagtccaaaaatctcattttacagactgaagaaattgagaaccagggtgattattttcaggaattatagaatatattctgtgaatttaggcagaatcaaaatagaactcaaagatttaatacccattccagggcactttctaccataccacgctgttcctcaaataataaataaattattcaaatacacgaacattatgtcatttttacagaattctaagttgtgtgttttttgggttgttgttttgttttgtttttgagacagggttttgctctgccaccaaggctggagtgcagtggcgcaatcacagctcactgcagcctagacctcctgggctcaaacgatatcgcccacggcccctcaactccccatcccacttcggcctcccaaagtgcaaggattacaggtgtgagtcactgcgccagcctaagttaggtgtttaaatgattctaagacacacattctttcacattttgaaaatattttattttgaatttttagacttacagaaaagttgcaaaaataattcaaagagtttaaaaaatatacacctctctcatcccactccttctaatggtaatatcttagaaaaccatatgacaattatcaagaacaagaaattaacaattatacaatatcaataactaaacttcagaccttatttgaattttgccagtttttctactaacctttttgtttgtttgtttttgagacggagtctcactctcgctcagactggagtgcagtggtaccatctgggctcactgcaacctctgcttcccagtttcaagcaatcctcccacgttggcctcccgagtagccaggactacaggcgtgtgccaccacacccagctagtgacctttttgttgttgttgttctaggatctcacattacatttatttgttcttaatctcttccagcctataactggttctcagtcttttcttagcttttgtgacttggcacttttgaagagtactcctcagttatttctgtacaatgtccctcaatttgacatttttttctagagagagaatctcacgctgtcacccaggctggagtacattggctcaatcatagctcactgcatccttgacctcctgggctcaagtgatcctcccatctcagcctctcaagtacacacacatatatatagtatttatatatatatatagtatttatatatagttatgtttgttttgtttctgagacagaattttgctctctctctctctctttctctctctctctctttctctctgtctctatatatatgtgtatgaaaagttacgctataacaagtgtggaaataccaagcaaataaaagtctgtaaaaagaatacctcctcttcctcttttcttcctcctcctcttcttccttttcttcattacttcttccttcttatctttcttattctcttcttttttttctttttattctaacctttctttcttcttttccttttcctcctctccctcctcaccaatgctctttctctcgtctgtccactttcctctctccatatttcacctactaaaatagtatttatttggtccacattcccgtaaaattgctgttgtttggggaaaaaaaactctaaggaaactcagaaagctgtgttacccaaatcatttacaatttgagttggttggagaatatgccatggagaaagcctgttcggagatgattagcatgccagtccaatgtcttttcctacttaaatttttaagatagtttaggactccgataactattatgtcttagctagtggttattcagaaataaaataaaaaaactgtaccatactttttttcaccaagtagaattagctcagagcacagtgcattgggtgtctgggcttctggtaggtgaggctgggatgtgcaggtagagattattgagtaccgtagtagtacagcagcatccaagtttaaatttgagggtgggtgtcagcttagaaaatctgagtgcttgcaagggctgagaatttctccagcctttcctgcagctgtcagaagtgccctgttttgcccttccctcacacctcctcccaataattctattactcaggggaaggagacctgggagggtgaaatgactcattattctattagacaatgggacgcttgggttttgactaaggctgctcagactgccagagtcccgacctccatggcaatccagaggcacaggaaatctgagatttaaagttgtgaactcagtattgacatgaaaaatgccacttgtgttgtgctgaaacaggtatgctgattatgtaacagcttccaacacattccctgccggtggtgggttttgattgacattttatgagccttattactcttgaaaacaatactgaaaatgccatgacaagctcaggatggaaatatgaacacacgatcctcttcctgctgaactagaaaatagcttttcgaaattcttggaagaaagtggaaagttcttcatgtagattcataatgatcaatctctttttgtttcttgggaggagaaggatcctcaaatcttatagcaatttagcatggtctagtccccagaacttttctttgggcttcttacaacttacaaataaatgttgacttctaaagtagagagggaaatgcataggatatcaatggcttgataaatatttacagcaataaattacagttttttgcattcatagtaattccttggtagagggagtttattgtttaaacaatatagagatggaaatgcagcagaaattcagatttttttctgtgtttttttttcttctctgtataaggtgattttttttcttctctgtataacaaattttcaaagtagaatggaggttcaagaatgtcaatgaaatataaatggtatggtgcatttgctttcattgaattgttggctctccttaagtatattaggatagcaaactctctgaattaggatttcaacctcttcgatttccttctgattttgtgtaactaaaatatataaatgagactgcacacaggccgggcgcggtggctcacgcctgtaatcccagcactttgggaggccgaggagggcagatcacgaggtcaggagatcgagaccatcctggctaacacggtgaaaccccgtctctactaaaaatacaaaaaaattagccgggcgtggtggcgggcacctgtagtcctagctactcaggaggctgaggcagaagaatggcgtgaatctgggaggtggagcttgcagtgagccgagatcgcgccactgcacttcagcctgggcgacagagcaagactccatctcaaaaaaataaaaaaaataaaaaaaaaataaagagagactgcacgcacactagcatccctggattccaaatacctatctgctttgttataaaattaatagtaataatagcagcaacaatggaaatagtagctagatttattgagttcatattgtttttaacttgtgaacccaagcagtcccatagccactgtgctatactttagtgttatttttaaaaatcacgctcaactaaaaatgggaagcccaggcagctggtttggtgtcacttctctgctaagatgaatgccctctgcaccctcaagtggtgaagcaggtataggcggaatacatacagaatgaaaaactgtatttgtgaaacactttgaaggaaaggtgttgtgaaaattgtgttttgttaagtattgagggatatggaattagaaataatagtacagttgagacagaaagatcatttttctgaagcacatgtttagtgtcggcaaaggttaagctgtttttgatgaacctgttttcatgtgaaaattactataaatggtcagcagatacttgcttttaaggagcctacttctgattggtcagccagataagcgtgtatgtggtgattgttaagaagcagctggtgtcagtttaaaagaatgatgttctatcctcttccgtcttgaccagtctgagaacagtaacatcaatatttgaagttatatattcaatattcattacaatattctgaaactagttgttcatggaaatatatcggtaacttaacacaattccaaatgccattttttatagttatacttttttgctgtttcttaaaatgatattactagatccatattctaattgtttccaacctagggacggctaaaagttatttttttttctttttttttttttttttttttttttgagacggagtctctctcagtcccccaggctggagtgtagtggcccgatctcggctcactgcaagctccgcctcccgggttcacgccattctcctgactcagcctccctagtaactggggctataggcgcccgccactatgcccagctaattttttttttttttgtatttttagtagagacgcggtttcactgtgttagccaggatggtctcgatctcctgacctcgtgatccacccgtctcggccttccaaagtgctgggattacgggcgtgagccaccgcacctggccttaatatatatttttataacttcatcatagaggtgataaattttatccagtataaaacagtgcattttaaaaatctcattttgcttcaacaacatacagtaactggaagcatggctactgctatcttatttaaacaagtataaataaccaaaatctacagagcaaattatggtgcagttgaaaaatatgactacttttcagtggggtatgtttatatgaatattcaaggagatgacaaatatttacatttttcattcctcattattaagaacttgagaaaactaacgagtatttattactcctgaagtgaaagataatgagacaaaatcctgaagacatttctcttttggataactgtggttttaaactccataagcaataaagccactgtcaatggaattattttagatgttatcttttgacgatggattatgttttttcttgtctttttaatattaatttacatttagttatgtcatatagtaaagcatgctaatcttaagcatatgtacttgtgtaaccacctccgatgaagatatggaacatgcctataatcccagcactttgggaggctgaggcagggggagcgtttgagcccaggagtttgacaccagcctggacagcatagtgagactccatttctacgaagaataaaaaagtcattaaagcatggtggtgcatgcctgtagacccagctactcaggaggctgaggtgagaggattgcttgaggccaggttgtcaagggtgcagtgagctgtgattgtgtcactgcactccagcctgggcaacagagcaagaacctgtcttcagatgcttcttcatcacccttctcatttcatcctctcttcccgtacaaagcagccattcttctgagctctgtcatcatccattagttttgcctgttcttgaacttcatgtaaatagattcatactatatgttctcttttgcatctagactcttgctcaacaagacattttgaagtaatctatgttgttgcatatacaaacaattcattttttacactaccatgtagtatgccattgtatgtacaggcatttttttatcactgttgtgccaatgggtatttgaatttttcctattcataatttaacaattatgtataaagctgctatgaacattcttgaagctgtcttttcatgagcaattacattcacatttctctgaaatatatacaggaattgaattgtttaaacaaataatttatggtatgtgtgtaatagtggatatgtattgatgggtgtgtactgatatttcaatgtggttttaatttgcatttccttgaaaagaatgacattgaatactttttcatgttcttatcagccatttgaatctttttttgtaaatgcttcaagtctttgctgattttaaaatcaatttctttctaaatgatttttgttagttttgtttgtttgtttgttttgagacggagtctctctctgacacccaggctggagtgcaatggtgccatctctgctcactgcaacctccacctccctggatcaagcaattcacctgcctcagcctcctgagtagctgggattacaggtatttttagtagagacggggtctcaccatgttggccagactggtctcgaattcctgaactcaggcaatccgcccgcctcggcctcccaaagtgctaagattacaggcgtgagccaccgtgcctggccggtagttttgtttgtttgtttgtttttgttttttttgaatgctttggatttgagtccatcatcagatatagactgtgaatattatttctcagtctgtgtcttgccacttcactctcttagtgtcaacttttgatgaacagaaactctacaaattagacttaaatgtaattttttaaatgattaatgattgtttcctgtttaagtaaacttgcctattccatttcttattttcttatttatccaattctcttccatgctagtgcttttgagttctatgtgagaagtctgccaatttacttcatattttcttaagcaaaatattttgaacaaaacttagctttcctaatgactcagggtcctcatttttaatagtaattactactgtccaataaattttatataacctacccgatagtgttgttaccaggataaggaagatatgtatgaaaattcttgatacatgcaggctgttgtcctttttgttctactctaatacttcttattcttattaagggtataggacagttattaatatttttatgctcagtggttttcgacaactctaaattttaagttattatatcaaattctgggctggacaggtaaggtgtttgccatacatgattgcaattgtgaggtttctttgtgtataaagtctttaaatttatatggtaggtcaaaaaacatattagctgataataatacttactttcaaatatcacttaaaatttctcttcaaaagcatttttttaaatctctttttaacaccttgacccaatgaagtaaaataaacaagatgatactcccgttaaatgtgtgtacaatcattcagctgctgtggcagaatatacaacagttctcagccctgtgtggtcctttctcaatttgtcactcaattgattgtactcatacatgtgttagaccaacatcctcaataccgtttgttggttagcatcatctggggagactgtaaaagcataagaatattcagctaccaacccagggggttctttaaattagtgggactggggtggtgtccaggcatcagttgtaaaaaaaaagaaaaaaaatattttattgtgcaacctggacgtgattctcctgttggcttggggcagggttatgcaaacttcagcatgcattagaatcacctgaagggcttgttcaagcacagactggggggctccacccccagagtttctgattcagtaagtctggatggacccaagaatttgcaatactggaaagttttcagatgatgctgatgctgctggctggggaccacagttcgataacctctggattagatagccatcaccatccctaccacaagtaaaacttgctggtcattctcatctgttgctgtctcccatctgcctcttctagccctggggttcaagttctgtttgtttgttttgttttgttttcacgcacaatactaagctatttattttctcacttgctcagagagagctttaggattgactatgtattactttacctcttttcaaaagaactaagtatctccaatatgaactgtgagatgacttttgatagtaggtatttcatctcaaagagtgcaagtatgtcaaaagaggggaatttgagaataaaacttagaagcaaatagagatcaccttagaactactcattcagccagaaaatcaggtcacaaaattatagcacctatctccagtttatatatatatatatataaatctgtacaggaatagaaaaaaacctggacccaaacatcagagtgttggtaatggtagtatccaggtatttggggttatcaatgatctggtggccttttgttatctatatcttacgattattttttccataggaaaaactgaataaaagtaaagcaatttaaaagctatataaatgcttttacacacacacacacacacacacacacacacacacacacacatatataagcatttattcagcacagatttgatgaaactcctctacctatgaccatgccaagcataacagggtctcagaacacagaagcttacagacctgttgagcagataggaacccccagtttatattttcatgaaatctagtaaaatgttgagtctctttgtagtcgtaagaaaaatatataaagacattaatgatcattgactgtgggagacaatttcttaggatgtaagtgcctttgattttttttcctaaagaaaagttgaaaggacttggcctggtaaaagctgcttttaacttgaatctacaccttttatttttgaagtcttaaagagttttattcatttatattagattcagctggataaggatcagtttctttcactttgggtcatgggccctccaagaatgaaatgatactttattcactggaagcatagaattgctttaaacataaatgaattatggctctgttaataaccattaatgttcacatctccaaaaggtagcaagaccctatttataaactaaattcactggttggttgacatatgatccttgtcctcttccatcatcgtcatcatcatcattgtaatatatagttgtattagtccattctcacgctgctatgaaaaaataccttaaatttataaagaaaagaggtttaattaactcacagttccacatggccgaggaagcctcaggaaacttacaatcatagcagaaggcacctcttcacagggcagcaggagagagaaagagagccaagcaaagggggaaaagccccttatacaaccatcacccccatgattcaattgccttctaccaggtccctcccatgacacctggggattatgggaactacagttcaagatgagatttgggtgggaacacagtcaaactatatcaatagtatatatcgttattagattctaaagtcagcctataaaataaatcaaaattcatgttaagtcaaaattaacctcgtttaagtgttttttcaagctactttaaaaaaggaaaacaatcttgaaatttccttaagaggctttttattgcagacctacatttatcaatgagatcaacagagccattttttcctccagtgttgaagggatgtatttcttcagttcaccagaaaaagtgattggtttgtattcatattcatgttgtatgaaaactatgaataatgtctttatttttaatgcaatttatttatttgattaaattttttaaaaaatttatttagtcattcattgatttaagagagtatctcactcactctgttacccaggatggagtgctatggtacagtcatggctcactgcatccttaacctcttgggctcaaacgatcctcctgcctcagcctcttcagtagctggaacgacaggtgcacaccagtgaggtctcactatgttgtccaggctagtcttgaactcctatgctcaagcaatcctcccacctcagcctcccaaagcactaggattacaggcatgagccaccatgctcagcaaaaaaacagtgtctttaaacactctgaatcactcttagctatgatacttacactatgaaaggaacatgggaactgaatacaggcatccctttgtatcagtgagggattgcttccaggatgctcaagtcccttttataaaatgacgtagtatttgcatataacttacgcacattctcctgtagactttcaatcagtcagtatactccagattacttcaaatacctaacaaagtgtaaatactatacaaatagttgttgtactgtttagagaataatgacaagaacagatagtccatacatgttcagtacagacagaaccatgcatgttttttttctgaatatttttgatgggtaaccgtcaccttaagaggtgagtagttgcatgggtaaccatcaaaaatattggttgaatccatggatatgaaatccatggatatggagggctgattgtatgatggaaatggtttatccagacctctcagcccattcaaagagaggaatagcagattccatttgacattagtaggtaaagggaggggggggactctgaattacttattctctctaactctttttccttctgttctaagtatctattgatagttattaaatcaccgcagaatccaggggcttaaaataatgtatcattatatcttacattcctgtgggttgactgggttcactggggcaggtctcacttggggtccctcatgcaattgtagtttgtaggctgctggggcttgagtcatctgaagactcaacctggctggacatccaagatggtattttcacatagggcccaaagattggttggatcaggtgtgacatttacatagcgcatggggaagctggccaccccaccctaatcttataaaaataggttctttgcttggccggcggcatgttgcttgcttcttactacacaagttgatggcaaagagaagggaaaatggagccgccatgttggacatgcctagacccaggtagccttttcctattggcacaactgccggcattcacccgggcaagcttctagcttgcttgtctatgtctgcagctcagttttacgggctgctttttgttagaaaagaaaatgatttgggggcttcttttcattaaaaggaaaaccttaccaagtactcctctaccctcactatctgcctaaataatttcttcttaactcctatatcactggttttgcctgctgtaaacatgccaaggggcaggaagcagaaaatgccaggccattaggggctgtaggtagaactgccatagtgctctttctactcaattctattggtgtaagtagtcacagagcctgcccagactgaagagagtggagaaaggcttctcttgatgtgggaggggcaaggtcacattgcattaaaacatgtgggctgggagatattgctgtagccatctttggaaaatacaatcgattataccctcccttcctctttctcactctctttctctcatctcctctcttttctcaccttcctaagcatagggttgggtctgtctgtgtgatgtaaattcatgggtgactcagcagcactacaacactttctagtatatttagccctttacatatattttacatgctacataagtctttatttacattatactgaaggtctaatgcccagaaacaagtggaattcttttgtttaatggtttgatatgtcctataagggatctgaggtgactcagtaattatgatttcaaaataattaagaatattttgttgaaataatctctgagattctacttcaattccagggtatacagcagagcactttggattcatttaggaggagtgcttacaatttccatcttactctctgcacatgaagagaattctggaagcatagatgcttcactactttgagtgaatttagcttgacacagctgattagggaagacatcaccaatggttgtcattcatctgtgctttgctaagtggcgtgtcatctaaaacttaaacagccagaaactcgctgttatcctttcattcactgagacaagttgatatagaagctactggaataattaagtgatacttttacactatttgcagttaggaaaagttttatatacatttctttatttgtttctacatcctagcaagctgttattttcatcctcattatacagttgaagaaatgaggctgagaaatttatcataaatcatacagttaattaagggcatgtgatttggtcaaccatctgaagttccattatgccacactgacacagaaaacaaatattcttaggattagctagagtgcctaagaggtgagtagttgcttttttttttttttttttttttttgaggtagagtctcactctgtcacccagtctgaagtgcagtggtgcgatcttggttcactgcaacctgggttcaagtgattctcctacatcagcaccctgagtagctgggactgcaggagcgtgcctccacacctggctaatttttgtatttttagtatagacgagatttcaccatgttggccaggctggtctcaaactctcaacttgaagtgatctgcccacctcagcctcccaaagtggtgggattacaggcatgagccaccgcacctggccaagtatttgctttttatggagtggcagaggaagggtttgctttcatatctttttgcttagacaatgaccacttgattatgaaaattctgctggaagtgaaatcagggaaaggtttcagagagagattatttgggaacagtgtgaactaactcagtcttcacttactatgaaggaaggacagaaaagtcatttttccatttaataaatacttaatgtgtcccctctgtatggaagatagggctaggtactcttggagtaacatatataaaaagcacagctctgcagaacctcaaggaacttaagtttagtagaagtcaaagacatttttactattaaaatagaatagaaagtgtcagttactaccttatgaaaggtaaagtgaagtaagatgacatagaataatgtttccaaaaagaaagaacattcactttggctactggaaaattatggaagcctgcctgggatgaaagtattggtgttggaaggtggaaaatatagggaagaaattggacctggaagagtttggaaattgctgcatcactataggcaatatgaaataacagattgaactaatgcaatagccagttggaaagggtcaagtgaaagctgaagtaaggaatacgtggaagtagattctgtggcacttgccagttgattggatgtagcggatagcggagtaggggattgtctcagggacccgaccacctcttaaaggcccacctctcaatactgccactgtggggattaaatttcaacatgagctttggagggcaccgatgttcaaactatagcaggaatggaaaaagtttgaatatgggtcaccataaagttggtggtgctgtcatgaatgtcaggaaatgacaatgggtggagtatgtcacggcagaaaatgtatgacatacccagaattggatattcaagaagtgtctatttacaaaggagccatttcagaaggttttaggatgggggcaccacaaaggatagtgcagtatcctagtgcagtatctgggccttagtggctgattttatacttttgctatacgtgaattgacaagggaaataaataattacctggcctagaaagggagggtcatgtagtgacagccacattgcaggaagtgacctctagtgaagtaaaatggaccacctcaggcaacctttcagtaaaggagcaaagggaatacataccttgactttattattctctcctactgcagtttgcactgcaagtccaagggcaagagagtcctgttgacgtagtctgtataatcagcttcttggggcactgagcaaggtgggcaagcagatatggatatgtggatgccatgcagactgtgtgaactctagaactgagcctgggttgggtctagcagagctgtttgcacaaaggcacacacacaatgacagacaagctagacccttggataatggatttatttagatcagagttactttaccttggcactattgacattgtgggttagataattctttgttattggaggttgtcctatacattgtaggatgcttatttaggggcatccttggcctctacacactagatgccagtagcatgcacctccaacccctgacaaattttggtaatgaaaaatgtctctaggcatcgcaaatatccaccggggtgaggggcagggtgccaaagcaaaatcacccttagttgagaaccactgattagaggctggacaaaggaaggtgagccagagaaaaggaggccaagaaccagcaggctgagaggaggaacagacacttggggagtgtgacagtggttgacgtggttgcagcccacagtgcgtatccatagaaattcttaatagggactgggcctgtgaagtggagaggcagaaaggagtagatcagacggcagcaggctggggcgggcaggtgggaaagcagggcagccagcatgggcctagtttggcagcagagggaaggcgcagggaagcagggtaccttcgacaggtgggtttaagatttgcttgaggacagagagatttgaacatattggtcagatgaggggaggaaagcagtgaaaggggaggttggagatgggtagtgaaatccaccacctgcagagtgcatgtgatggccttgttctggggctttccatgtgttacagcattcgactctcacgacctctctaggaggttgtcagggtgggtgcccttatgatccccattagcaggtgaggtaattgaggcccccagtgtttactcactcatacctagtccacacagctagtagtggccaagttgtatttgaacctgagctgaagcggagtgagaacattccagtgagcaaaagaaggatgcgtgcaaacccttagaaataaggagggaaggtgaaagtaagcgaagttatggacgtatttgatgtttgacaggaggtggattacagttcccggctttcaacggaattaacaggctcaggaaggtaggcgttaacaccctctgcagaagtagtcttggcagaggccagcatagaggatattccccaagaggtggctccgacttcaaaatgtcaagagcatggttgttcccgttgtctgtgccccagtgcttctctgatcctttcaaaggattgttgtgcagttgtttttctcatttttgtgtataaatgttttctcttactcttgtaacaaattaccacagatttcatgctttaaaacaatgctaatttgccattctggaggttagtagtctaaagtcagtttccttgggctaaaggtgaggtgttggtggtgctggtttcttctgaagtctctgagggaacatttgtttctctgccttttctggcttctggtggctgcctctattccttagtatgtggacccttcttctatcttcaaagcacatcactccagcctctgcccccatccttgtcatcacattgctgtctcctctatgacttcctgggtcccttgtacaaggaccatgtgataacactgggcccacctgtgtaatcactgtcatctcagggtccccactgcaaggtctttagcttaacccaatctgcagtgtccctttcgcatataaggtgacattcacagagtctggggaacaggatgtggacatacttgggggctatttttagcctacctcggttggtttctatgtaatattctagatggatggaaagatggtttagcctagaggtgaaggacatgacctctgttgcttagaatcaaatcatcacttcccaactctgtggcttgagtcagtcatttacccttgctgtggtcccatttcctcgtgtgtaaaatggggatagtagcattcacctgtgttatttgggggattaagtcaaggcatgcacagtgtggcaaatacaatgcggggctcttactgagtattcagtcagtacagtcaattattattcctgcaattattttatataaacattttcttcaaagtattttaactagaagagtgctgcccatctgattagttaatagattaagctgtttctctaaaatcaatgatcacgtgatcgaaagatgtcacttcttggctgatagaagaaaatgcaaaaacagggtttgtgtcactatggttccccaaatcatagatgattaccttcaagttagcatgaagtcagaactgacattattgtcaggaaaaaatctgctttgttttcctcttaagaaaaaattgtaatcataataaccttccctgcccagggcaaagcaaacaactaaactttcagcaaatcttcaccagactcagcacatcagatcaagctctttttaacaccttgatttttttttttttttttttttaaatcactgtagcacccaacttagcttcttctttttatgctgttttcttctggcctctgagatgtcatgacctttttaggttcatgttagtaggtaatatttaagtacaagagttctgaaatttaaaaaataaaagaaaaagatacacacacacacacacacacacacacacacacacacacaattagggtttagggtgacctgaagattatcctggacaagctgaatgtgacttgggtaagtcacatatcctctctgcctcagtttcctcagctggaaattggtggtgatgatacccacattatagggtgttatgagagtcaaaagagataaccgttgtacaagtgtgtgcctgtgcctggcacactgtgaacaacaatgaacaagaatggcgatgatgatggcagcagtgaggatcatagtgggagtaaaagggaagatgaggaaggaccatcagaaaacgaaactgggaagcctaatgtggggagaaaaagacaaaacatgaggaaattattcttcttatggcttggtgtatggataatggctatctatgtattctgttgaatttttttttctaatagcacaaatgtaatgatattttagaaaacaaacaccattcaaaaatcctttgttttatttggaacaaactttcaaaactcatttctgcctaggttcatattgaagcttcagattcttccttaatatgtgcttggaagtaaacatgatatggagctgtaatccatgtgattaattcagtgaaaacaattaagctgaaactagaacctagaacccggtggtcttgacttttttcctcatgctgccatcattttaaataacataagatcaactgtttaagtgagaagctaatttacctgccagcatatttagctttgttgagattcttccatatcctacagataaaaaatgagattaaaccatgtatatgtatctattcagtactaaattattctgtatgaaaagacaagtactgtgaaacttctattaaagtggccacaagtatccctaacatagaagtagtccccctctccgcgccccgccccccccactttttttaagttggctaatttaatgagatatttacattgttatcagtaaccactaaggagttacaaaccattacttctacaggcaatggccagtgtaattaaaccttttaaccttgctagttttcccagtttgccattatcagtcattggtcacagtacatattttttcattattagccacaaactagctatgtgaccttaaaaggttatttaaagtctccagactttatttcccaacccccccaccccaccccatgaaaggaagaaggaggagacaatgatccctgtggtccatttcatctccaaaacccaagaccatggttctgcaacagtttaacaatctggttaacatttgaaagtaaatgaaaacgagagaaaacattgcagctctgccagcaattttctctctctctagttggataaaaactatccaagttgtccctgtttgcaaaggagggtattattatatatatatataatatattatataatatataaaatatatatattatataatatattatatataatatatatcataatatatatcataatatatataatcatatatatatatatttaagagacagggcctttgctctgtcacctaggctgaagtacagtggtgttatcatagctcactgcaacctcggactcctgggctcaagtgatccttcggcatcagcctcctgagtagctaggactacatgtacacaccaccatacccagctaattttttttttttttaattttttgtagagacagggtctcactgtgtttctcaggctagtctcaaattcctagcctcaaaagatcctcctacctcggccttctaaagtattgggatgacagatgtgagtgcctgagcccagctgtgatttatattttaatgaacaaaagattagaataaaatttgtaaaatttttatttctaactatttttcatggcttgacataaaataaatgtgcatttgggcaaatactgcatttcagtgaggcatgtacttccattgtgtgttgaaatgtaagttggcataaaagaaccaacaaaaaagtcattacagttttattatttgttgacagcaagagagaaagaaatattctctcaagatgaacaataatgtcctgttaactgacttaaaaagagcaaagtttaaattgcttattcagagaactctaccttctaatactttgagcttcctggaaaaagaaatgggttcttgataagttatgtgaattgtgcttcgacataaatgtcaatgtttgatcacaagttttttttaccaaatgccaatctgcgaggtcagctagttcaatgagtcattttgcttaataaggaaatttaagtagttgtttctatcctttgttgtcacgttggaaatgcttcaaagagaagctacttgttctgataaaatagaataatatgaactttggaactagacaaaactgaattgagttttgcctttgtcactaaattaactgtgtggtgttgatatgtccttaaaacccttgaagcttttacttcccaatctataaaatagggatgataataccttcttggtagaatgggttttgagatgacttatctactatgtttgttatcccctgccacttggtaataataatggctagcatttattgagtgtttaccatgtttcaggaaacttgtaagcactttgtaagtattaccatatttaattctcatgacaatcttgctgtcatttgaatatttgtcctcctaaaaacttattttgaaatttcatcctgaaggtggaagtattgagagatggggccttaaaaaggttaatgggtcatgagaactctatctcatgaatgaatcaatccattcttgaattaatggattaatgaattactaggttagtagattaatgagttatctcaggagtgacactggtgacttgaaagagagacctgagctagcaagctcagccccctccccacatgatgccttgtcccaccttggaactctgcagaaactccacaccagcaagacggccctcaccagatgcaacccctcaaccttctcagactctgtaactgtaagaaataaattccttgtctttgtaaatttctcagtttcaggtattccattacaaacaacagaaaacagactaagacacgccctacaggtggatataatcattattctcattttgtaaatgaagaaacagaaacaatgacaacttatgtaattggccaagtgaaatactactaatcattaaggccagcatttaagctctcatggtgttttgctctagtgaccctatttgtgacactacattattctttaccttggtggatactcagtaactggttgccatttttattgaccatggtagtataaagcatcaagtttagcacctagctaggaatccaggtgttttcttggttctctcacttacccaggataatcaggtcttcagcaaatcatgtctattgtacctcctaatccctcttcttctaattcactttttccttgctgcctttaatctaagccaccattctttctctcttccaggctagggcagaagcctcccagtaggcccctccttagctccttgagttcttctcctctctcatccagagtgcagccagaaggatcctttacaaaaagaagtgtgtgtgtgtgtgtgtgtgtgtgtgtgtgcatgtgtgtatgtgtgtgtgtgtgtcccacctaacttaagagtttgggggaatgcccccatttcttatagcttttaggaaaaaaacaaggatccccatcatcgcgttcaaggtcctacactgaggtgacatagctagtatattcagctaactctgaaaggtcctttattcacttccttagcaatattaaacaaacccttggacacattaaatccctgttcccagcttttgcaaatgccatccccactgcctggaatgttcttcctcttttccattcacctgggtaagtttcacttttccttcattttagcttaaacctcactcctttggaaaagccttactgtaattccaatcatacgtgtgtgtgtatatatgtatatgtatatatatatatatatatatgtgtgtgtgtgtctgtgtgtgtgtcggtgtgtgcatgttatatgatttggccgtgtccccactcaaatctcattttaaattcccacctgttgtgggagagacccagtgggaggtaattgaatcatgggggcagatctttcctgtgttgttcttgtgatagtgaataagtcttgcgagatctggtggctttaaaaatggaattttccctgcacaagctgtcttctcttgtctgccaccatatgagatgtgcctttcaccttccaccatgattgtgaggcctccccagccacatggaactgtaaatccaataaacctctttcttttgtaaattgcccaatctcggttatgtctttatcagcagtgtgaaaatggactaatgcagtaaactggtaccagtagagtagggtgttgctgaaaagatacctgaaaatttggaagtgactttgtaactgggttacaggcagaggttggaacagtttagagagctcataagaagacagggaaatgtgggaaagttttgaacttcctagagacttgttgaatgactttgacaaaaatgctgatagtgatatgaacaataaggtccaggctgtggtggtctcaaatagagaggaggaacttgttgggaactggagcaaaggtgactcttgttatgttttaggaaagagactggcagtattttgtccctgccctagagatctgtgggactttgaacttgagagagatgatttagggtatctggtggaagaaatttctaagcagcaaaacattcaagaggtgacttgggtactcttaaatgcattcagtttcagaagggaaatggaacataaaatttggaaaatttgcagcctaacagtgcagtagaagagaaaattccattttctgaggagaaattcaagctggctgcagaaatttgcataagtaatgaggagctgaatgttaatcaccaagacaatggggaaaatgtctccagggcatgtcagagacctttgtggcagtccctcccatcacaggcctggaggcacaggaggaaaaaatggtttaatgggccacaccaagggtcaccatgctgtgtgcagcctagggacttggtgccctacatcccagccactccagctgtggctgaaaggggccaacgcagagcttgggccatggcctcagagggtgcaaacctcaagccttggcagcttccacatggtgttgagccttgtgagtgcacagaagtcaagaactgaggtttgggaacctccaactagatttcagaagatgtatagaaatgtctggatgctcaggcagaagtttgctttaggggtggggtcctcacagagaacctctcctagggcagtgcattgggcagtgtggggtgggagcccccacacagagtccctactggagtactgcctagtggagctgtgagaagaggatcactatcctccagaccccagaatggtagatccactgacagcttgtaccatgtgcctggaaaatctgcagacactcaatgccagcctgtgaaggcagccgggagggaggctgtaccctgcaaagccacaggggtggagctaccccagactatgggaacccacctctagcatcagtgttacctggatgtgacatatggagtcaaaggagatcattttggagttttaagatttgactgccctgctggatttcagacttgcatgggccctgtaacccctttgttttggccaatttctcccatttggatcagccatatttacctaatgcctgtacccccattgtatctaggaaataactaacttgcttttgattttacaggctcataggcagaagggacttgccttgtctcagttgagactttggactgtggacttttgggttaatgcggaaatgagttaagactttgggggagtgtagggaaggcatgattggttttgaaatgtgaggacatgagaattgggaagggccaggggcagagtgatatggtttgtctctgtgtccccacccaaatctcatcttaaatttccatatgttgtgggagggacctggtgggaggtaattgaatcatgggggcgggtctttcctatgctgttctcgtgatagggaataagtcttaggagatctgatggctttaaaaatgggagtttccctgcacaagctctcttctcttgtctgtcaccgtgtgagatgtgcctttcaccttccaccatgattgtgaggcctccccaccaacatggaactgtaagttcaataaacccctttcttttgtaaattgcccagtctcgggtatgtctttatcaagtgttaaagtggactaatacagcatgctaatatgtgtgtgtgtgcatgcctacacttgtgtgttttaaataaataaaggtcctccaataatggtaagtagtaatgatactggtaatatgaatggtagtctgtcagtagtaatgaagcctttgttcgggaaatatgacttttgaaatgtagaattcatgtcagtcattggaatagactagtacctttgacgtgcagaagccaatctgattgctaaggtgaagctcatagcctagacttggttcagggggactccctcctgctattaaggttagaaccagggtagaagttggctgctgcttcaaagggctggaaactctgaatacctacttaagtacaatagcccactcctctgataagctgtgattggtttgcttttttctccctccagcacatgattttgattttactcctttcagctttagagctgccttaaagattaatttaatctaatttcatattggttataattctggagtttgtaggtaggagagtacaatgaggtttttaagatggcccctgggatgttcttgggcggagaactagtagtagcaggattagtgacaaaaggcaataggtttttgtttgtttgttggttggttaattttttttctgtttgtttactaaaatgcagatttcaccaaagcaagaatatccggaatagtcaggatgtgcttagtcagttacctctgtgggcggatgctccccttgctcttttttcctttccttttattggtaacttgtaatcagctgctactttagtttaatgagaaaaataacagtttacattacatctagattaaagaaactgctagacgaacaggggtgggcaagttgtcaatggcatctaataaatagtagtaagtaattagcacaggtctgatggatttgaaggaaagtaaaaaactagggaagaggaattgtggattggggaaacatagctgtaatttgagaataacacatcaagaaaataagaatgaagcactgaagtcagagatctgtggggactgtgttggggagagggttgggggcatctcgtctgaggaacaaatagagtagaggaacatctcatgctgggtttgtactctgctcaccctgctccactccacctctcaggcttttggttttatcagattgtgtctataacaaagccagataaaagtgacaaagaagtgcagttcaaggttctgctgtccttcccttgtctctgggagttagcaagtcacctttaaatgagaaaacagtgtgaccttacgtacttcacacggccattctgagacaaagttggagaagtgtcatgcatcactgcactcttctaaggggtggaaggaatcaagcatattccagacctaggagggatttcttaggaattcacactgatgtaatttcaaaactcccaagacagccaccacttgtctggcattagctaacctatgacacttcactcaattgcattttgagctcctgacttagttcattcagtaacgtttttgccccaggatgccaaagcaaacactggtcctgaactttgcctcttgaactacattcttcaccatgatgcccttccaaattccctatagatgttttcactactggtgtgtacaggaaggaagttcactttgactaataaccaactctgttatttctagtggagtgatcatttgtctcttctgtccattggcctccctttgattcaagcagtggggtgtgtagaggaagctctgcatccacttgacaagccttttaggtcccaacagcagtggactccttatcagggctactcataaaaggctaaccttccaaaggaaacttgtcagggctcagctgttggcaagatggattaacaagtgcttccagctaatggagtagacattggtgacttaatgagggtagtttgaaatcttagctgtattctcttattctttttttttttttttttgaggatgataaatgagtttagttctttcttagctaagaaatgccaatgatttatttttattattcttatttttattttttattttttagagatatggggccagggtcgggggcagggaaggaagggaagtctcactaggttggccagaatggtctcaaactcctggcctcaaacaatcttttcacctggtccttccaaagtgctgggattacaggtgtgagccaccttgccctgcagaaataccaattattaaaaactcagaggttgtagtgcaacatatttgggagtggtcacaccccatggcctttgattttagtctgaagattgaaaataacctttggattttaccttgacaaggaagttgttcctcagtggacacagacatcatagttggcatagaaacagctgttgggttattcctgggccattgaagacatggcacctggcccagtctgaatggttgttctctcctggttgcttgtttaaataaaggttaagcaaaaattcttttttggttttgatttcaggaagaaataagggagtgactgcaatgttatctgaaaatgagcatttcctgtttcctcaggcatttctttatgacccccattaaagttaatgaataaccaagtgtctgacacagttgagcgtaatatgcctcacctaaggttcccggtggctgcacatttttgtgggaaatgaccttcagttcctgcagatccattattaggcaatctcttagttatagactttatcttcccaaaacattcaaatcacatattagccaaatcacttagataccgtcctaagtgctggaactctttaagtcttgttagcagaaaaggctaaagtttaggtaaataagcagatctgttccacaaatgattcctcaccttaggtatttatgaaaaagctctgataaacttttgaaagcagaaaaagacgttaaaaaatcttactgtgagcctgaaaacataaacataaatcagctaaaagataatttgccttaataggtagtgggcgatgggggaggagagtgatcagggctcaccctggcaaaattgtctctgccggatgtttcaggttcgccttctctccccgtcacctcctcagaatcttaggagaccacataggatcaatccttgttcaaaggcaaaggcaaaaaaagtatgactgcaaatatgtgaagtacgatttggcacggagttcattttgggaccctaagtcctctaggcggtacagctatatattgcaatggactgagtgtttgacacacttgcccagaactcctgcatacaaatgaggagtggcatccttaacctcaggcagttaaatgttccattcccctgaaactaccattttccaaagagctttggaattgtcttagggcctatttaaatgccataggaaaaaagttaatttcatttctttttatggtcccatgtcatttttaacccctagtagtagcagtatttctagctgttaaaagtaagtatttttgagtcacaaatctaacaattgatttgtggcaatttgtttaacctcctagagccacagcttacttatttctggaatggtatgatagtaaaatctaccttatggggcctctctgaggattatggataaagcggttaacacaattccaggcaactagtaagcattcaaaatgtgttactattattactgggattgttgccgccgttgttattaaacaacttgttcacataccttttttcactcgacttggctcagaattctaccagactgttcagaaaaatcaagtgtgtgtttaatgtacagtattttaaagtcacaaatccagaggcttttaagaataagttacaaggtctgaagtgatttttgaaagtacactgagcggagtagatcctgttgaatatattccaggctctaaaatgactatttctaaaggagatgatgctgtggaatatgttataaaggaacaaaaaattactttactctgtagacacatttcatagtttttgtgcaattttctagtttcaacagcttgtccaatatgtattgaatatatattctatgaatgatatgtgctagattctccttgggatgccatgttatagaggtcttcagaacgctttcattaagattcattcatatgtcaggacttaagatatatatatatataagaaatctcatgaacagaagtttcagaaatcagttcattgcttgcctgaattcaaggagaaagaagtcttcagagtgaagctctggatctaggagagaattttctcctcagcctgttttcaggaagtggcttctgtgtcctctgtgcttggaaattggacgattttggttaatgtggaagatcttaatgaatactttctaagagtaaggctatatacaggtcaggcacggtggctcatgcctgtaatcccagcactttgggaggtcgaggcgggcagatcacctgaggtcaggagttcgagatgagcctgggcaacatggcgaaatcccgtctctacaaaaaatacaaaaactagcagggcgaggtggcgtacacctataatttcaactactcgggaggttgaggcagaagaattgcttttacctgggaggcagaggctacagtgagtagagattgtgccactgtactccagccagagaatgagactctgtcaaaaaaaaaaaaaaaaaaaggctttataaatatcaatatcaagtccatccctccttgccctgtgtttatggggaacagtagcaacatggccaaagtcttgcccaaggcgaggtttaaattttgcagaggcatttgactctcttacagattgtcttcaagaaacaggaaggaagggtttcttcagaaactcctggaggaatctatgtttttaagtgacattgatgcttcatatgtttgcctctgaagatataacttgttttattggagactgaaactacctatttgctatatctgagaggttactcatcagtacccacatctggcattcgcactgaccattctttgtacaagagcttggttttaaaggccataaatctgatatctacactagattgaaaactatctaataaagctccttctcaagcataatttactacggtgggatgctgatgaaacagaaggatttacatatgagttttatttttaaaaatttatttgtaacatcaatgtccggaatttctgcagacatttaaaattattgtttaatatttaaattatttattctaaaaatatactttcacatggggtatataaataataaagacttagattaaaagaagaaacacaggtaagattatgtttataaaaataaaaacaatgtttatgtaagtaattaattaaaaagtattctgtgaatacaaagcagtatcaagatgtgtgtgtttgaattatatggttttttttaaaaagtatgttaccatatagcgacatatagaattttagcttttttggaaacaatcccaattatttcatatattacttttctggatgaagggatggtatggaataatggaataatcagtggatattcctgataatgttttaaaaatagagaaatatcctgggtgaagaaaacttcctttggtgttgatttggatctgattaatgattttgataccagtgggctagggaagatccccaaatgccagtgaaaccttggcctcagctgctgtccaggctcttgacaccgtcctgagaatgaattcaaggatgagttggaaaatagtggaagtacacagatttattacaaagcaaaaagtacgcattcaagaaagggcagtgcaggcagattcaagaaaagggagtggaggcagactcaagagagagtcaggtgcaagggggttgggactgctacctttatgggattctgtaaccaaggggtagaagattcatgaagattcctggaacaaggtggagatttcttggaactctggtaccacccatttttgcactaaatatggatgtttctagaactgtcatagcgctggtgggtgtgtaatttaagatgttaatgagcatataataaggtcctaggtgaaatctaggtcaaatccagtgctatgttgggtccggtccgttttaggtcggtcatagcttggtccacacccagattttttcaggatcttatctacccctagcttctgcagctatttcaaccgtttctttttgctagtcatgtgaaactgctgcctggaattttctatgttcctacaatcaccctgtattattcctatgtcaattttaaaaggaattatttgtctctggggatcttcatgagctgtggtttctctggggatcttgatgagctgtggttacatagctctaaaatggtcctgaggatgggtcagtttttacaagtagccggcagcttaaatggggtaggcagttacactggtcatttcactgaatacatcagctggcctggcatttcacttgaggtcaccaattctgagccccagagaggagccagctgttcacatttccaaaacccctatgtcaacgaatgggttttggaaatgtgatcagcctcatatttaatatcgggagatacacaatagataaaaaatgttgcctttggaaggatgtgacttgaataatgctgcaaaaggtggaacacaatttgagtgagttaagaagcccagggtagttattttggaagttgcagatttgctagcctgctatgttgagatatctctgaagacaggggctcaactccaccaggacctgaggtctttgcttaaataaccccacataaggcccttgtttcttccaaggaccaagagaactgagagctctgtttcctttttttttttctttttcttttttttttttttttgagatggagtctcgctctgccgcccaggctggagtgcaatggcgcgatctcgactcactgaaacctctgcctctcaggttgaagcaattctcctgcctcagcctcccaagtagcagggactacaggcactcaccaccactcccggataatttttgtatttttagtagaggcggggtttcaccatattggccaggctggtcttgaactactgaccttgtgatctgcccacctcggcctcccaaagtgctgggattacaggtgtgagccaccacgcccggctgagaactatgtttcttaaacttaatctgcaacatgactttaatattctaaatctctaattagtagccttgggctgggggaaggccccctgaaagttattgataagaaaagttatgatatattactcacatgcattatttttgctccaggaagataaagatcaagaaggggcagaattctgtgtctttctgtgagactgtctctttttcaacatttatttagtttccatgtgaaactccttacactgttgtaaactagtttcttgccctgtacacagcttgctgggcctgctgctgttcttgatggcctagtaggaaaggaaatggcttgagacactttccacctttcctaatccttcttaagccttgaatgatgtcagtgcaaacaccaagtgaaaaaaaaaatctcacgttgccccatttcccaactgtttgaccactgcctgttcatggacagtgaacccactcataccataacaactttgcatcattttttttttaaagaattgactacacatcaaacacaaatgcctaggtcttgggtagattccaacaaaacattacagtgagaaaaataagaaaaaatatgttacagtgagcaaagccctcagcctctgcactgaatatccttagcccttcattttcatcagattttcttgaatcacagacctaaggaatttattttctctactttgcaaaggagctaactgaggctgtaaaagacaatgctcccaatgactctgacttcaagagacaagactatgataaggaccaagttactttatttccagccttcaatttgatttattgtttttatttatgcactgcctacttcaaaaagtgatttgagggagactacagatcaaattccctttcaaaatagatctcacttctttgggggaagatgaaagggtaagggtgaagcaaggtgacacattttagttgacaatctctagacttgggctgtcatagactagagttggattcagttatctaatttgcaccgccttaattaatgctccaggtctacaggtacatagtgtgaatttaaaagtttgaaatattcagatcaaaatggttataactgtaaccattcacctatcatccatccatccaactctccatccatccatccatccatccaaaagacatttattgatctcctactcagtattaagcacttgtcatattgagtgggtggtgggaggagaggatagagtcaggtgttaacgcatatatgtacacataactacaaattatagtaagagctgtgttaaatatggcaaccattttttaagtctagaatttatttgaggctatgcagtagagaaaataactcatttatttctgggtaagtagtttaaggatcacttttccaaagtgaagtcttttcttaaaaatagaaatttctcatctacaacattcatcatagaaagaatgcagcattgcatcagaactgatgttcttgctcataaaataaacaaaacacaatggtgtctctatctgtagaatgtaggtgttgtaacacatctgcctagaagctagttaaaatgcatgttgttcttatatttcaattagaagtaagcagacttgattgtctaacacaaaaactcagttgctttgatgtatttgtttttgcatatggttcaaattatcatcaaaactgtattatcagtgataatatactaatgcagtaggttgacattaggggctgactagctgactgttgccatatataattaatccaaagtaatgtgatatggcctttaagatgtaaaagaatttacacaaattattttctcccattatttccagagattagatgttatggaaaagacttttaaaagatgacatgatttaatagccttttcctaagtagactataatacctgtaatgcagaagaatttagaacttttagacatgcatctagtttacacatttaaaagctaaatgtatatcgtatattgtgaagttcctttctttgaaatttttttaaaaatcagatttgaaaagcctttttgcctatgatgttttagagataatactgctggaaagcaagaacctgacataaaagtccataacgatagctttctaggctctaatcctgtgattccactagaaatatcttttgggtgggcatgacattaaccatcctgtcttacaaatacaatagaatatttaatgatcttccattgtattctggaaaatagactgcattctctttctctatctgcctccctctttctcccttctcttgtcctttctggtactttgccagaaaccgcctgtttctttcctggagtccagtaattgaaggtaattttttggaagatggtttcaattatctaaagccagtggaatgtttaactgccccttgctattcgtgaacttgtttacagtgggatttcagatgaattcagattacatgcaaccagatgttatctgctatggttacttttttttttttttggtgaaggaaaattgtatgagggaggggtctttgatatcatatttagatcaactgccctcaaattcttggaagtgtgcccctgggataaagttttggggtaaacttttgatcccaaccaatgaacatccaaatatgagaatatacattctctgtgtaataaatttaagatcttcccattttctgtgtgtctttatatgatactaatccaaaaaaattgcctcacaaaaatattttgtcatccatctaagttagagataaaacaattataaactgaaagctcattctattcttactctgcctaaacatcacagatttactgtcatgctgcccagataatagaaaataaatgttgtgatatttaacaagaaaaaaaatctgaagtaataaaagtcacctgtgaaacaacaactaaatgctctagtctgtagacagttgaagactaatttccttaactgacagctgaagtgaaggcttagtaagatgtattatttgtaaaggttgaactttaaaatctgaaagagaagttgaatacacaaatcttagcttagaaaacagatagatataatcaatctttatgaaataattatttgccttatttaggaatccagcatacacttaagagattttttttaaagttggtttgcaatgtaattaaaatatgatttaattttcaaagtttaattgcacacaaacttttagaaaaatgaaactatctcttgttgaatcttcaagaaggcatcaggcatgattttgctcccctataggttggagaagacatccaagagttttaggattaagagaatacaaatgcctttacatacacagacatgcctacatgcatgcatatgtgtgtacacatacatgtacaggatagatatgtacatacatacatataatattttttcttagcacttagttatatagcacttgccatattacctgaatgtagtttacacttcattgaataaaaaaaaagaacaaataaaacaattcaagattttctgcaagcagaaaagggatgcccaacaggagctgtgggcttcaagggatgtaaccactatcaaaatcacgctctggaaggaaagagtgtgttaggaaggaaaaacgttcttgatctctcttcccaccacctgttctcccggggcctcttgttgcactcacctaacaggaaggcagatggcacgggagcaggttgaagagtaggggatcaacctccccagtcaaaaagcagagcagagctgactggagaggttcacttgaagctaggagtttgaaaccagcctgggcaacaaagtgagatcccatccccaccaaaaaatatataataaataaaaaggaaatagaaaaaaagcagagtagagaaatacgaaaatgaatatggaggaacagagaaacaccagcacaccaatatctctcactgatctatgtactactgttcttatgatttgaacttcatgcaaaaatgccactgtttcaattatttttctactagtgtagattatagtctttccagtcaatgaatgtagtaattactaatccacataatgttccattatgacttagatttggttgatctggctgtgcatggtggctcatgcctgtaattccagcactttgggaggccaaggaaggaggattacttgagcccaggagtttgagagaagcctaggcaacacagtgagactttgtctctaaaaaaagaaaaaaaagtaacaacaaatttagttgtttttttcaaatgagaattttaattatgaaccaaatatataatggaaatacaaaactacatcataatatttacctgatttattttaatatatactatatatatggccttttagtaaccaactgtgtacacaaaatgcatttgataatgcagtgtcaagttgcagaatcattttagagataagatatggaatattaaatatcatttttgtgttttacctattgtgtgttttattttacttgaaaataaaacttgtagagagatgggattagttacttggtaaattataagaagaaatacagtttcctcaaataattttacatatgaaaaattagacgtaagatgaatacttaattgacaaaagaagtaagtctaaatagccatatgggtcaggtgcggtggctcacacctgtaatccccacactttgggaggctgaggcaggaagattgcttgcaccaaggagttcaagcccagcctaggcagcgaagtgagaccctgcctctaccaaaaaaaataaaataaaattaataaataattaataaaatgaaacaatcatatgtaatgctcattaaatttcaaggggctaaatttatatgcacataatacatgaaaaattcatatacagtgtcatacgctgtcagtggaattaagctaaatattgacaaaacgttaaattaaaaataccaaaatggtaagaaattcagaaatgacttaaatacctatggatttaaaaataccataatggacattataaagtattttgaaaatgaatgataaaaatattacgtatcgaaacctatgggatgcagttaaagatgtactcagagggaaatgtatgccttaaatgcatgtataagaaactagagaaggctgaaaatccatgatctaaactttcagttgaagaagctagaaaaaactacagcgaaagtaaaacaaaggtaataaaggtaagataaaaatttctgcgctggaaaacaaacacataatagagaaattcaatactgctgatctttagattcagtgcaataaagattccaacaactgtgtttgtgtgtgtgtgtgtctgtgtaaggtaccaaggaattttaaaagtaatatggaaaatgaaggggccaagaattgtgaagacagcttgaagttgcacacatctgatagacttgtactactaaatatcaacatctattataagtagggggtctcacgggccagtgtgctctgcacatggctgctagccttggctgtgtggcttttcacatcaagggaatgggaacttccggaggtcagccaactctgcaaataaccagtactcagatccactgaagcctacctccaggaatctgttacatctgagaccaggaaggagctgtgaacattaacgttgataaagaaaagcccattgaagagtcttccagagaggggaggcagagcgagatggctgaatagaaccctccagcaatcatcttcctcctctacccttgcaggaacacaaaactgaacaaatatcaacccaagaaagcaccttcatgagaaccgaaaattaggtgagtgatcacagtacttggttttaacatcatatcaagggaagagacactgaaaagggtaggaaagacagccaacaccaccccttcctcatcccccagcagcagtgggctgcttggcgcagagagataatttgtgcttgggaaaaggagagtgcagtgattgtaggactttacattgcaactcagtgctgccctgtcacagcagaaagcaacacagggcagaattcagccagtgcccatggagggagcgtttagatcagccctggccaaaggggaaccgtccacaccagcaggcgggtttgagctagctccaccactactggctgaagtgctccattgtagtccttgtggcctagactgcctttcagataaatttgaaataaatttgcctttcaaaaaaatttgaaaggcaatctaggctacaaggactacaattcctgggcaagccctggtgctgtgctgagctcacagccagtggacttgggtgcacatgacctagtgagacacaagctgaggcagccaaaggaatgcttgtgtcactcatcctccaacctcaggcagtgcagctcacagcactgggaaagactcctttcccttgtggaaaggagaaggaaaaggagtggggagaataaagaggactttgttttacaacgtggataccagctcagtaccacagtaaaataaagcaccaggcagagtcctgaggcccccattctgggccctagctcccagatgacacttctagatctaccctgggccagaagggaacccactgccttgaaggggaagtatctagtcttggcaagattcattacctgttgaccaaagagtccttgggccttaataaacatcagtggtagccaggtagtactctccacaggcctcgggtgagacccagttctgtgctggcttcaggtgtgactcactgcattcccagctatggtggctgagagagattccttctgcttaaggaaaggagagggaaggttaagaaggactttgtcttgcaacttgggtaccagctcagccacagtaaaataaagcatgatgtagattcctaaagttcccaaattcatgcccttgcttcttgacagcatttctagacccacctgggtcagaagggaacctgccaccctgaagggaaagacagaagcctggctggattcaccacttgctaactaaggagcccttgggccttgaatcagcagtagccaggcaatagtcaccatgggccctgggcaagtcccagtactgtgctggcctcgggtctcacccagcatagtcccagtgacggcagctataggggtatttgtgtcatcctccatcccaattccaggcagttcagcatggagagagagactccatttatttggcagagagtaaggggagagaacaagagactgctggtaatctagggaattcttctggctgttacccaagactaccaagatggcacctctatgagtcatcaaaaatcatagcatcactaggcttggaatgcctcctaatgcagttacagctgcagtgaccaaagattagatcacaacattcatttccctttgaatgcttggaaagccttctcagaaaggtcgggtacaaataagcccaaactgcagaggttacaataaatacctaactatttaatattcagtgctcagacattgacaaacagacacaagcaccatggtcatccaggaaaacataacctcaccatatgcactaaataaggcaccagtgaccaatactggagtgacagtgatatgtgacctttcagatggagaattcaaaatagctgttttgaagaagctcagtgaaattcaagctaacacagagaaggaattcagaatcatatcagataaatttaacaatgaaatggacataatttttgaaaatcaagtagaaattctggagtggaaaaattcaaccaatataccaaagaattcaccagagtctctcaacagcagaactgatcaagcaaaagaaagaattagtgaacttgaagacagggtatttgaaaatacacagtcacaggagacaaaaggaaaaaagaataaaaaagaatgaagcacacctataggatcgagaaaatagtttcaaatgggaaaatctaagagttattggccttaaagaaaaggtagagagtaagattggggtagaaagtttatttaaagggataataacagagaactttccatgcctagagaaagatatcaacgtgcaagtacaagaaggttatagaacgccaagcaactttaacccaaagaagactacatcaaggcatttaatagtcaaactcccaaaggtcaaggttaaagaaagggttctaaaagcagcaggagaaaagaaacaactaacatacaatggagctccaatatgtctggcagcagacttctcaatggcagccttacaggccaggagagagtggcatggcatatttaaagtgctgaaggcaaaaagcttttatcctagaatagtaagtatctccagtgaaaatatccttcaaacatgaaggagaaataaagactttcccaaacaaacaaaagctgagggatttcatcaacagcagacctgtcctacaagaaatgctaagggaactcttcagcctgagataaaaggacattaataagcaataggaaatcatctgaaggcacaaaactcattgggagtagtaagtacacagacaaatgcagaatagtataacactcattgtggtgtgtaatggtgtgtaaactactcatcttcagtaggaagactcaaagctgaacctatcaaaagtaataacaagaacaacttttcaagacactgacagtataatatgtgaacatataggccaggtgccatgactcacacctgtaatcccagcactttgggaggctgatgtaggatgatggcttcagcgtaggagtttgagactagccagactctgtgtctacaaaaaaataaagaaattagccaggcatggtggcccatgcctgtggtcccagctactcaggagactgaggtgaaaggatcgcttgagcccaggaagttgaggctgcagtgagccactgctccccaacctgggtggcagaccaagactctatctcaaaaaaagaaagaggaaaagatatacatagaaacaacaaaaagttaaaaagcaggagaatgaagttaaaatgtagagtttttattagttttctttttgcctttttgtttttgcaatcagtgttaagttgtcatcaatctaaaataatggcttatttgcaagcctcatggtaacctcagattaaatgttaaaacacaaaatagcaatgcaaaggcatgaacaaaattttgtatgcaatatgggtaggtttcaaaagtataatcttgaatgatgaaaagttgcagaataatgcattcagtatgatacaatttaaagatataaaagcaatactgtatattgttcagggctatatatctgtacaaactttaagcaattggctgaagggatgcatactaaattcatcattgcagttactcttggaaagtggaatttgactgggaaccaagaggacttaattttatctgtaatggtttctttcagatgaaaaaataaaaggcttaaagccttgaagggcaaatatcaactgaattcatgatgatgattgggatagaagaatacttttctacattaaattttttttattttcctcagaaagcaaaacaaaacacaaacaaacaaataaaatctattatgaatgattgggactgggtataaatgaggtgtttggaattctggtgatgttctataacttcatcaagaggtagaaacggccgggcgcggtggctcacgcctgtagtcccagcactttgggaggccgaggcgggtggatcatgaggtcaggagatcgagaccatcctggctaacacggtgaaaccccgtctctactaaaaatacaaaaaattagccgggcgcggtggcgggcgcctgtagtcccagctactggggaggctgaggcaggagaatggcgtgaacccgggaagcggagcttgcagtgagccgagattgcgccactgcagtccgcagtccggcctgggcgacagagcgagactccgtctcaaaaaaaaaaaaaaaaaaaaaaaaaaaaaaaagaggtagaaacatggaaatgttcattttgtgaaagttcatccagccatacaaggtaggattggtccactttgttgtatgtgtgttatccttaggtggaaatttctggagcaaatatggcaaaataagaaaatttgacgtagtctgacataaaacttgacatacacagattattctttatgcttttctaaaagcttgtgatattttaataacttcaaaagagatggttcattaataaaaatattttgattttggctgtattttgattgcaaatctgtgtactgcaaaacaatctcattacttgctttttctgtaccataccatgattttcacttcatcacaccttagcaaaagctgttggggaatgagaagacatgaatggtctggtaaatgctgttgattatgaaatcctctgtacctatgatctcaagaataatggtggggttctggacggagaaggttagaatgatagcaggtaggaagtctcaacagtaatagaaaatggctgtttgggaaatgcaaggacccagaaccctcctagtactgcagctgtcggtgagtaaatgttcatttgataagctaccagatcacctctcaaagtgattttgtccaagggcagtccactcaacactcaattacgcagggactgagtatacaggacttcaattttctccttccttttgagaaccactatccaaaggataaaagaaaagtagcacagcactctgctctgtcatgattattgtttacctttggctaagaggtgtcatctctccagctttcctctaaaactttagggtctaatggtcaaatcccaggaccaaactccaggtgtttaactgttgcatttaaaatgtatttataacatattattattattattttgtcattggtttgcaagtacgctgcaatatgctatgtccattttccgtttgactaaatcaatttgaaaacaaaagtttaaaaatctaaactgtgggttttctagggggatttatgttttaaggagtgataatgaggtctagaacatgttatcttattttttgtttttttttaatttttatttctgtaggttttttgggaactggtgctatttggttacatgagtaagttctttagtggtgattggtgagattttggtgcacccatcacccaagcagtatacactcaacacaatttgtagtgttttatccctcactccctctcatcctttcccccaagtccccactgtccattgtatcattcttatgcctttgcatcctcatagcttagcgcgtgtgcatgcccacacacacacacacacacacacacacatatacacacacacactacaattcctttatccactagttgattgattggcattcgggctggtttcatatttttgcaattgtgaattgtgctgctataaacatgcatgcacaactatctttttcatataatgacttcttgtcctctgggtaaatacccagtagtgggattactggatcaaatggtagatctacttttagttctttaaggaatctctgtactgtttgccgtagtggttgtaatagtttacattcccaccagcagtgtagacatgttcctttttcaccatatccacacaaacatctagtatttttttgttttttttggctatggccattcttttaggagtagggtggtatcacattgtggctttgatttgcatttccctgatcattcatgatgttgagcatttttcatatcttttttggccatttgtatcttcttttgagaattgtctattcatgtccttagcccacttttcgatgggattgtttgtttttttcttgtagaacatgttcccttattgattggttttcacattcttatgatcaatgacgatatcattatcaccaagaatttgcttaatacttggtgcctacccagcctgatattaaacacagggtggggaaaaagttagttttaatgtaggtgcagactcaaattcctatggggaccggtgaggtaacctaaatgagcaaaatggtcagggtgtaagaaaaaagccaagaaaccgccatgataaatggaactgtatttgcctcagtgccctgaagacaattgggagtagtgttaaaccggaaacttctgaatcagacacgctccactctacttccagctgattgtagccatacaggaatttgggcccactattgtcaaatcttgatttttcaagagaaacatggaatatctctcttttaaaaaatatgaaatttttccattttggaaccaatccaattagaaagtaacaaacacacattttacagcatgtgtctgtacagtgtgtgttacttcctaattggattaattttgttactttctaatttgattggttttgctaacagtaattttctattactgttgagagttcttacttgccatcaatctaaacctctctgtccagaacccaccattattattgagatcataggtacagaggatttcataattaacagcatttatcagaccattcatgtcttccatatgggccaaacaaaatgcttctaagggctgtttttggcataatcctatgaacctcagctttccaatgtagtcaggggaaataagacacacaatttatgtaaaaaggatatgaaacaacagtaagtgctgcatgcattcctctttttattcattcaaacaatagcatttattaagggccttctagcttccttgccctgtgtgagttactagggttacaaaaatgaacaaaattattttgtattgtcaagcagcccggtctgggaaaagaaacatatcattagatttgttattaaacagatcataagagtctaataataattgggacaattagtatggtagaatttcaaagtatagagacttttgaaactgtctttgcataaattatatcattgagaaaaattatatccaacagtaagctgagctaacccactccctatcttgcctttcccttaattattcctgggcttttgggccaagctaactttggaagacatttgggctatagtttaaatgataataggccttgcccccaaactcaaacacttttataaagctaatgtaaggctacaggctggagagaggagggaagcctgaggcctgctaaggtatagacataaatgattgtcagccactattccagaggttataaaacatgcaacttccccagttactcctgtaataacttcactattgtagaacctaagattggccttttgagatatcttttcaggtttttttgcatgtctgacacctgtggttccatctggacctgccaatctgacccctgtggccccacccagaaggtgttcagcatgtagatggacagctttgacctcctgcgagttcatctccaccccaacaaatcagcagcaagcacccattacctggccaacaccaccccttccctcaaactgccttaaaaaaggcctaaccggggagctttggacaagaatggtttgagtactaactctctcccatgtggtgtggctgtcctcatgtctattaaactctttcaactaccatgccaaggtctttctttatgcagcaggcagttacacttcgctgacatttttcttaaggtcatgggaaataattagcttctctttaaattgtataaatatatcccctctatctggactacactttagtcaggttgacagaagcagaaacaagtcataaaagtaccttacagtcaacttctaaaggaagtactgtcatagaagtgtgagatttcctaggagctgttgttattaaccaatagttttaacacccttttaaagcatatcatcaattatactaagtacacagggctatttattttaaatgggtgtactaccagatagctatctatttatcaatatgcacacaaacacatacattcatttacatagtattttatttcttttgccactaaagacattcttactttagctacaagttaaataacagcaacggccacttttttttttctcacctgcaaactgtggtgcagatggaaagaaggcacttaagtgaataagctgtttttaattctagaactctttggttgtgataaaaatggaaactatgtgctctagaaaagctgagtaaattcaaactgtttactgttaaatgcaacttatttgtcaatttaggcagtaaaggtctgaacactcaaattctgtgaatgtccttataagcattcactttgatgtgtaaaactttgtagacttgaaggagggagtgtttgatttccatatacttccaaatattcccttcaggcagtttcctccaaagttggaatattgtggcgagtaaggaggaagttaaggattgctctctgaaagttattttgtctttctaggtggaacaacaatgtattcattagtgataacaatctagatatgaatgatgtaatgaagtatcggttgaactaatgagatgggaagctacaataacctattgactattttgctaaataatatcgccaccttcaaacataaaaacaattgttgaaaaagcttctgtcaaaaataaacccttcaatattttatgacaggtattattgacagaatagaagagactggaatttcctatcactgtggttggctttaaagaatacaacttttaacacatttttcatctctgtaataatacagtaatgattaaattccccttaaaaagcccaaggcatctatttgtttcatggaaacttccaagtgtcctctgtacagacttgttcaagtgggagttcataagtgcaagaacagtaaacttcagcttatctaacatggccaaggaatggtatgttctacttaatcaaatattcttgttgttggagagctgtttcacataccacgcattttaattttcaaagagtaacctttggttagcattaaagctgcactcacatagcctatagtttgctttgatgcagtaatagaagctcatctcctttatcccccacaaggtagttcttctatctttaggtgctttccaggatttggccagaatttacccatggacccctcctattgtagttctcaaattgcgaattctgagattcactgagagtcatccaagctctcagtggatctcagaatttttgctctgcctcaaaccagcctaccaaacgtttattctttatgtgtgactggttggctgcttgtggaaccagtttgagcttcagtcttttagttgataactgtgtaaacatactaactatccttgaataatagttgattgaaagagccgattttgcctcttatgatttaattaaaataaaggatttggaatcatataatgatataaacttttgtaatatataaggactctacctgacatatcgtctctagcctaaatgctttattataaacacaatagttgcattcttgagtgactgttgtattctgtgcactatactaggtgctttacagaagttatctccaggactcattaaaaagacacaaagaatgcattttatatatatatatgtgtgtgtgtgtgtgtgtgtgtgtgtgtgtgtgtgtgtgtacgttggaatattatgcaaccttaaaaagagggaaatcctggaggatattatgctaagtgaaataagccagacaaagaaaaatagatccatgacctcactttaatgtggaattttaaaaagctgaattcatagaaacagacaatagaaaggtggttatggggttggggcaggggaacggggagatgttggtcaaagggtacaaacttgtaattataaaatgagtaggttctggagacctaatttatagcatggtgactatagttaatacattatatacttaaaatttgctaagcgagtataacaagtattcccaccacaaaaaaaggtaactatctgaggtgatgcatatgttaattagcttgattgtggtaatcatttcacaatgtatatgtatatcaaaacttcgtgctgtataccttgcatatatatattttttatttatcagttatatctacaagctgaaaaaaatacacacaaataaacaaagcaaaacaaaactgtaagataaatttaatagaagctttggaaattactgccctatgagatcatcagcagaggagcgggtcttccattcttcctgtacaatgtctgctgttgggtcactgcacactgctctcgggctggctgcctactctttagaaagtctgggtacttcactcccaccaactgagaagtgtgcttattaagatccagtttgctctcaaacctgtttatgtcaactgacattgaataatttcaacataaggtgaacaaaaagagtgtttttttaaaaatgaacataaagtctaaggctttgcaaaattttgataaaagccaattgctttaaaaaaaatactgtcaaagtaggtttgggtgagacccctgtagaggactgggggaaaccataaaaacccaggagaggccgggcgcagtggctcacttctgtaatcccagcactttgggaggctgaggcaggcggatcacaaggtcaggagatcaagaccatcctggctaacatggtgaaacctcgtctctactaaaaatacaaaaaattagctgagcatggtggcgggtgcctgtagtcccagctactggggaggctgaggcaggagaatggcgtgaacctgggagttggaggttgcggtgagccgagattgcaccactgcactccagcctgggcgacagagtgagactccatctcaaaaacaaaaacaaacaaaaaaaaaacacaaaaaagcccaggagaattctcacactgccctgtcatacattatatactctcttgttcaattttagagataatggaaattgtaataatgcatcatgagtgaggttagtacaagaatgagaacttggaactctaactggtggactatgtcactcagggttcaggtgcaggaaacagaaaccactttaggtattttaagttaaagggatttaatataggcaattaggtcctcaggatataggatttttaaaaagggcaggaggatgagactcttttctggcctgccaggaatgactcccggaacaaatactctggaactgggccaccagggttgctgccacctctttgtgatcatgacagtggaaaatcagggggcgtctacctccaacaccacatgtgccttttaacactctcagggacattgcttcaggaaaccccaataactctggggccaggcttgcccatccaaaacagccaagagtttctgtcctccattcatcttccttgtgcaggccaggggaaccctgatttgcattcagaatcctaactccaaagaaatgtaggatctggagggttttgctgttcatcctctgtagtacaggaaagcacagtagaagaggtgtgggattgaagctgagtatcaaactccctatcaaattcccctagaaaagaactggctttctttctatgaaaataagttggtgaattaacgtgctattagttctttattaaaataaaacttttgatatgtagcctattttactgaccaattataagattatttaaaatcttatagaattattaaaatgggcaggcttagtggctcacatctgtaatcccagcactttaggaggccaaggcaggaggattgctggaacccaggagtttgggaccagcttaggcaacatagggagactctgtcttatagatgctgtctccaaataaggtcacattctgagctactgaaggttaggacttccacataccttgtatttatttttattattatttttgtaacatagagtgttgcagataaggcatttcagcaggtatgttttgagcacagactgtgtgcaacactttgtgtgggatgttcatcggggagaataaggaagaggaaagcaaagatgacctgatcatggtgcaggttcttgagaaacttaaagtctactgagaaagatggatgcacacgcagataactgtattactaagcagaaataatttaagtatgaaaggctctttggcgctgagaaggactgttccccccttacataagagggagaatcaacacaaaccacagacatgtagtttacgtagtaaaatgcatgtacttaaagtggatggtatggcatgactggagccactttatctgttcatttattgcttaaaataaactatgtttattatcaccttattaaagaagtacctattacttttaaaaaggtacttcttttaaaagacgtacctattactttgcatcatggttggatggatttttttccttttctctttccttttctgtgggtttagtggaggaggagttgggaagcttgagtaaaacccttattctgccagaaaatgtagcagttatatgtaattggctgtctttactcagagaaacaggagaacctgtgaggttcagcatggtggactttgattaaacaatgattatatatgaggcagttggatcctgctccaaatgctggttgcacaacttcagacaaaaggaggtactacaggaaaaagccagcaaatgtaccccattattgcatcctggtctatttatgatgggtgtccacccaggtctctggggacagcctaggtcacactgatcttgggtctccaaacactccaccaagagtagttttaaaatatgccccttaagttgattcctccccaaagaagcctaaaacatataggattcttggcaaactctgtcatcatgacattatataagatttataaagccctcctaaagattgctgtgggattatggaagcttcttgggtgccttctggcccctctaatcaacttttcacactgttgaggagataggggaagcaaactcatcatcactccaggtgtgtatcttctcacacttgatcttctgaactcagaggacagagatctgattataagaattattctttattacccaaaatttctataaagagcatgttttgtttatctgagcaaaactatatcatgagactaattatccctcttgggtttttgttgtaattaagctacacttttccccctgatttttagaaatttagcttttgaaatagaagataaactaaagaaaactccttcccagctaatttttttccataatttttttcagtctttgaaacacagaggtctctccccacctccctatttttttttttttttttttaccactgaatacattgtttcggcttagttatggattgttttctgaaaatttatctcctgccttccaactaaatttcaacatagaagcaagtgcttttattctctcttctttcccagatatataaagtgtctagttcttgtgttattggcaagattatgtttcctttgttttcttaacctcagcttcataaaaaaagctcacttcatgcttctgctccaagattggagagctcaaacatttataactccaaaaacaacatgttgccctacagaaatttaccacttgaatttgagcagtgttgaggggtatgccatgatgataggcagcaatggcaaaagcaaaggtaaaaagaagaaaaagagttttttgaaatgtgagctttgaattatttgtcggactaaataaatagcattaccctatcttccctaccttatgcagaacctcattttagaaaatcagcaccagccaaaagtgtaatgcaccatgccgccacttaggtagttacacattatttgaagatattccttaaaatgcctgctaagccacttttatctcttctgctatagcagaggcacagagcagtagaaagcacctaaatagcttcatgttattctttacttgaagaaggaattatagtcccaagatcactatagccgtggtaggcactcctaaaacaaatgtacagttcaggtcatttaattttatggttatagataaatgcagcgagatgagaacaaataacttaaacagtgattagccttaagtctacttgtgtcaacacaagatttgaggacagaatgaatcttctatttattttctgggcatttcttaaaactatgtttgttcctattaatccatgaaatatccattagttcacatacccaccgttttttatatttgtagctcagcaacacaaagacaacaaaaatataataataacaataaaccagcaagtaaattaacttactgttgtttgttttgttttgttttgaaatgagcgtcagtgaatctagtgctatatctgccaatgtcttgcttgtatcaggagctcttagaaaaagttcacacctaagagcactatgagttggaaatgcctattttagatgtgtttctcccatgtttttcctccaaaatcactcagtgaacctggttttacttgacttattttggagtgacatcctcaaagcatgctgaggactgcaactaccaaatataaagctggaaaggagtgatgctgcctgatgctagtgacaagttgttccttgtgtggcagacagattcaaatggattaatgttcaagccaagccctttcacctctactttctcatgaggagtgacagagaagaatgtgtggcttgtccatagacctcctgactcttctgccacctttgagttgacaccactttctgatctgagacagtttgtcacttagggtcagtagttttgccattcagtgaagttgtacaatggatttcctctgtggtgggaggaagagcaggaaagagagaaggaaagagagaggaatcggggtggggtaagaaatacagagagagagagagtgagagaaggaggatctcttttactaaatgttatctttgcctttttaattggtatttttagataataataactttcctatattaatagctaaaccctgtccttattatccattcagtgtgtatgatatgctcatacctgtgaggctccgtgatgggaaatgacatagtactctttgttcccccaagttctttttgccacttttcctggccatggtctcatcaaagcatttggaaaatgtgcagctgtggtcttccaggaggggacagatattgtactcatcgagtcggtacctggtgtctccactctctcatgacttagcccttcccctctctctccatccagccatgtggtttgtgttgaattaactgtccttgctgcaggatgaggccctaatgtgtttaagctaatcactatttcctatcccttgggtcatggtgtttagctcagggttggtcatgtgtttttagcaagggagcctcagggctttttgtggcctttccaactctggcctctacctcttgttatgaatgaagatgcattgagcgccgtgtgctcttggcactcatgttatgaccagaggacaacagcatcaggcagatacagcagaagtcagagaggggagatgcaaacaaatagggtgttttggttgttccctgtagcccatgctactgctggatgtttcagttatatgtgatagtaaattccttttattaaaggctgtttgatgggtttttcttatttgtcacccaaatgaaccccaaagggtcacaaaaacctgactgaatttcaaaatactttgtcattaattcttaattggtggtgggaactaaacaaagaaaacaccaattatggcaaaccatcgtgaacagtgaaagtttgacactaacaataatacataagacctaaaagtaagaccactgaagttttgcatcaaatcagccagatttctccctttctctgaactgaagaaaaatagtctacatcatggctgtttgttttaacttaaaaagtgtgaggaagtgagcatccagccccaagctacagtaaacagctcgttcaagcaaattacctagaacaaaagaaacacctctgacataatgtgggggtccaagcctgaaaataatagggtgctcagcaaagtcccagaacccctgtaacaagagcccggtagttcttatagcattcggagccaatgggaaggagtacacttttaaaatgtggtacagttggtgctgaagtctctttacccttgatttttcttttccctcctgaataggaaagcagagctagctctgtcatattgagccagttggtaatgggctctgccaggcgtggaagagataaaagccaccacctgcctcacccacgctccccctaccccatttcccggtctccggttgtctgcacagctgctgacagccagtcattgttccaccccagggctgcctgggagctcagccgtcccagtctcagaagcacaattgcagtttgaatgcagctcctgggtgggtttcctgtgcaccttggccatgaccccttggaaggctgtatgcctgcaagttgagcagagtctgatcatacacggcttaagtacttgccatgtgccagggcctatgaagaggagaacacaaaccagcgttacagggagggaaaagggtttgagcaaaagcaagagaagaaaaagtatgtataacaacattttgggggcatctattagttttctggctgtccagggtctactcatcttacttgctgagtagaacccctctttctcctcgagtatttctcccaggcctggccagtgagagcattgcattccctcctggcaactgtgattgggtcagagatgggcaaacgacttagctcaacgaagcccctgagcctcattgcacagacctagctttgagaatgagggagattctcttctttctttctacttgagaggagaatttataaagaggaatagtcaaaagtaagcctgaaagagcattttgtggcaaatatattcttgcttcttgggcatggtagacactgtgataagcaactcagaaccaccccctactttaggaataaaggacttgttccccagcagctgggagtgaggctggtagacagtcctcagctgtcaagcccctttgaggattgcctcaactgaagagagctaccgtgcgcaaggccatgccacctttttggcataatccatatccagtgactgatcaaagtaggggtatagaggcttgacttttttgctgcagttcaggacaactctggaaggtcaacccatcttcagcgttccttctagggccaactgaaacttcccttgaggttgcattgcagctccctctgcccactcctgcttctgtcccttcccttctatggcagtgtatcccaagagccctccctaataaagctcctgcaggttaacctaccttccagggagcccaacctacaacaccaagataaattgcttgtattttttcctggcggtggagcttagtgactgaaatgaagcatgatcactctgagcagaaggatggcagtaaactgaagcatgacttaagaagatgatgcaaatcatcacatttctcctgcctgtagctcaggatccaaacaccagtgaaagccatggccatggccatgcacttctccttttaggccatatggcattcagtgtgcagttcactattcaacaaattgaccacttgttttggttttatgcaggcacaatctgaaaatcatagttctgctgttaacatcaaataccttttaatgatgtttgacatgaaaaccaccatatactcttatactttccccctggttgtctggtgtgaagcatcttttaaagaaaatttatggtagttacctttataatggtataactcttaccaagtttaaaattaaaatgttatcacaagtggcatttcccatcccatttcaaatgtagagtacggcgagaagtctcaggaaattaaaatattgcctttaaagccctccttttatggtgatgtgaaggaaattgcagcacactagcatttacccaactatcaatatttttttatagtctaaaatatttgccaacattttccccacgtgaaatctattatatgaaatgattaaaaacaaacatcacgtgcactatacgttggagatgcttttaataacttggagtcagagtaaatgatcaccagggatcagagttaatacgggttgaaaggatgcccttaaaatcatgacagtggccttgtattaagcttgtggtttacatgcttttttctgtactgaatcgctaaaataaacaggcattcttccagttaattgtgtgtgagtgtatgtgtgcattgcatagtcacacattccatattgcttctgaaacataattttatgtaaatgattgtaaaaaacagaaatctaagctacctcagtactgttatataatccgtaacagatttgccaacccaaaagcctaattctatcgttaagacctaaattcatatattttataaaatatatgatattgatgttgtccataagctttttttgatgcgatccccccttatacaaacccagtttttattgtactcttttgtaataattttgtataatgtggtctcttcaaaagcgagaccagcacctattcgtttttaagtcctactacataggaccatacggcatgttgcattgctatttgaatctttttagaatggatcaggatgtcccaaaaaatcttagaagctgtactaatctcagcagtataaatactatatacttataacactattatataaatgtttaataattcaaacttcttttacagtaatttagtttttgaacttttaatattaattttttcattctagtttttttgttttatttaacatttggcttcttcagaggaactgcaaccaaactttaaattacagatttattattcaagagtcacaaaattctatgaatataaaagaaacttatctaattgaactttcaaatcatagtttcataagtttatacataacctttatacatctaaagttattaatgcttaaaactgtactgtgacttttgagcaccccagaagtctggttgttaattttttttctacatttttaatctcctaactatgtgtgtttttttttttttggtagtacccccagcacacaattttcccagtaagtacaagcatgtaaaatacaatttccttgccagttaatgttccatacactctaattgtgaaagccactgtatttagtgacaaatttaatcttcagtacttggaagaaggcaacatgggttaagattaaaaaagaggacataattgttgagttctaggtatcttcacatttttaaaacaaatgttctggaactgatgttcacgaaacaggtcagcccctcactgaaccagttctgctgtgttgataaatttcttgttagaactatggcaggaagcaaagcaaaatgattatagaaaaacatgtgctttagcagcaagatggttatttgagcatatagttttcctcttgggtgtccttgaataggcctatgttgagttgaagggagccaagatgataaaccagacataaagagctctaagcataggtttagaaaacggaagcttcttggaaccattttctatttgacagaaacaaaccctgactcagccttctcatttttccacataagtacactgaattctcttccccatccaaggtgtggatctttctggaaaaacctctagctgaagtgtttttacgtctgcaagaattaaaggtcacagactcttgtttctagacaacaaggacagttcactttctgggtgttaatgaaaatccttctatcttgaatacttcctgagaatacttagagtattataacagtcatgaaaagaaatgatgaaaatacaatcacatgttatgggtggaggacagcagggtgcagtgtatcacttctcggtctagatgacacttcaaagtcccttctttctttctaaaactgtcccaggcttcagactgctgactctcctttcctgttctgagctgctacagtcgatcctgatatggtttggatgtttgtcccctccaaatctcatgttggaatgtgatcgcaatgttagaggtagagcctagtcggaggagtttgggacactggggcagatccctcaagatggcttggtaccctccccacagtaatgagtgggtttttgctctattccttcacacaagagttggttgtttaaaagagcctggcacgtcccccctctctctctcttgcttcctctcttgccatgtgtattagtttgttttcatgctgctgataaagacatacccaaaactgggaacgaagaaaggttgaattggacttacagttgcacatgactggggaggcctcagaataatggtgggaggcaaaacgcttgtcttacatggtagcggcaagggaaaatgaggaagaagcaaaagtggaaatccctgataaacccatcaggtcttgtgagacatattcactaccacgagaatagcacaaaaaagaccagcccccatgattcaattatctcctcctgggtccctcccacaacaagtgggaattctgggagatacaattcaagttgagattctggtggggtcacagccaaaccatatcatgctgcccttggcccctccaaatctcatgtcctcacatttcaaaaccaatcatgccttcccagcagtcctccaaagtcttagctcatttcagcattaacccaaaagtccacagtccaaagtctcatctgagacaagtcaagtcccttctgcctatgagcctgtaaaatcagaagcaaggtagttacttcctagattcaatgggggtacaggtattgggtaaatacagtcattccaaacgggagaaattggccaaaacaaaggggttacagggctcatgcaagtctgaaatccagcggggcagtcaaatcttaaagctccaaaatgatctcttttaactccatatctcacatccaggtaatgctgatgcaagaggtgggttcccaaagccttgggcagctccacccctgtggctttgcagggtacagccttcttcctggctgctttcacgggctggcattgagtgtctgtggcttttccaggttcacagtgcaagctgtcagtggatctgccattctggggtctggaggacggtggtcctcttctcacagctccactaggcggtaccccagtagggactgtgtgttggggctccaaccccacatttgccttctgcactgccctagcagaggttctccatgagggcaccacccctgcagcaaacttcttcctgggcatccaggcatttccgtacatcttctgaaatctagaaggaggttcccaaacctcaattctagacttctgtgcacctgcaggctcaacaccacatggaaactgccaaagcttggggcttccaccctctgaagccacagcccaagctttatgttggcccctttcagccatagctggagtagctgggacacagggcaccaagtccctagggtgcacacagcatggggaccctggacccagtgcatgaaatcactttttcctccttggcctctgggcctgtgatgggaggggctgctgggaagttctctgacatggcctggagacattttcctcgtggtcttgggaaataatattaggctccttactacttatgcaaatttctgcagccgccttgaatttctccccagaaaatggcttttccttttctatcgaatagtcaggctgcgacttttcccaaacttttatgctctgcttcccttataaaactgaatgcatttaatagcactcaagttacctcttgaatgctttgctgcttagaaatttctcccgccagataccttaaattatctctcaagttcaaagttccacaaacctttagggtaggggcaaaatgccgccagactctttgccaaaacataacaagagtcacctttgctctaggtcccaataagttcctcatctccacctgagatcaccttagcctgaattttattatccatattgctctcagcattttgggcaaagctattcaacaagtctctaggaagttccaaattttcccacattttcccatcttcttctgagcctccaaactgttccaacctctgcctgttatccagttccaaagatctttgagtatcttttcagcagcaccccactgtacgggtaccaatttactggattagtcaggattctcttagagggacagaattaataggatatatatatagagagacagagagagagagagagctctaagcacaggtttagaatgtgtatatcctaaagggctaggcccgtctctccttttcacgtttttctgcctgctttatattcgctggaagctgattagatggtgcacaccagattaagggtggatctgccttccccagcccactgactcaaatgttcatctcttttggcaacacccacacagacacacccaggataaatactttgtatccctcaatccaatcaagttgacactcagtattaaccatcacaccatgtgacatgcctgttcctcctttgctttctaccatgagtaaaagcttccagaggcatccctcgaagctgagcagatgctggtgtcatgcttgtacagcctgcagaatcattggccaaatttaaccttttttcttttaccaattacccagtctcaagtattctttacagcaacacaaaacagactaatacagacgccttgctaggtttgctctcctataagccatgaggtgtaatgggacttttattccagttttcccttcttcctctgaacacacacacacgcgcgcgcgcgcgcggagagagttttcttggaaagaagaaaggaagaaaacatttaattctcattaggacctaaagctttacaactacacaaagttatgagcttctattgtgtaagaacgttatatcatgtagtcattgaaataacccttttataagtcaaaaacgaagcaaaacaaaatttaaaaccccaaaatgcaaagaggatgagcagttgtttgtagtccagaagctggtgggtggcaggtttgtctaactacaaagcctttttccactacacccctgctgacccacatgagaagcagagagatggtgacaaaaaaatagagatttctgtatttaccaaagcctggaaaagttggtaccacttatggcctccttttctagactcttgactaacagacagctttccttttttaatgtccaagggtggagttctttaaaccttttcgttacttcatagtccagatcatactaactgtgtcttctagaacgtaatgatacagttagatgagggcatattactaataaaagaaaaaaatgaaggggagaagaagaaaaacagttagagaccatttgattattcttgaataggattgacaaacactttctgtaaagggccaagaataagtattttagtttttgtgtaccaagaggtaaaattgaggatattgtgtaggtactgatatagaaagagagaaagcaaatttttacgaacattttattgatgaaattaaacataataataattgaatacttaaaatattaactagtaaataagaagaaaatttattctagtaatgaaaaggatgaaatcatttttgggtgggtaacattttgcttaattgttgttcaaaattagttttccctgtcatcaagttgatcataaatacgtattgataaaaaagcattcttagcatctgggttatactgaaagagatgggaggctggatttgacctgcaggctatagtttgcctacttctgctgcaaaatctcctgtggatattcacatctcatggaatcaaggagaagccactactgtgttctcttgatttcccaagtcctcacctgaaaggtcatcttaaggaaggacttatcaaaattttttcctgggatacttctatctatactttaagaattatagataaatggcttgagacaataggagagaggagttagaagttgtctcagtgaaatttctataagatctatctgaaaaaatttatatgagttttgaaaattactctatgttgtgatcatatttgtttcctgaagcctgtgtcttaaaaccaaagtcaaaagaagattcaccatattgctaagtgaaggaagccaattttaaaaggctacatattgtctgataccaactgcagtcatgagccacttaataatagagatatgtcctgagaaatgcattgttaggcaatgtcgtcatcatgtgaacatcgtagagtgatttatgcaaacctacatggtatagcctactacacacctaggctatactggtatagtctattgctcctaggctacaaacttgtacatgttactgtactgagtagtgtaggcacatacaacacaatgttaacgatttgtgtatctaaacatgtgtaaacctagaaaacatccagcaaaaatacagtattataatcttataagacaccattgtcatatatgtagtctgatgttgacggaagtggtgtaatgtggcgcatgactctatctgacactctggaaaagggaaaactataggagactatatacacatatatatgtatacatatgtatacatatatatgtaatgtgtgtatacatatacacatgtgtgtatatgtatatgcatacacatgtgtatatgtatacacatgtgcatatacgtatatgcatacacatgtgcatatgtatacacatgtgtgtatgtgtatacacgtgtatgtgtatacacgtgtatgtgtatacacgtgtgtatacacatacgtgtgtgtatacacacacctgtgtgtatgtatacacatacaggtgtgcgtatacacacacctgtgtgtatgtatacacatacaggtgtgcgtatacacacacctgtgtgtatgtatacacacacctgtgtgtgtgtatacgcacacctgtgtgtgtgtatatgcacatatacatatacatatacatacacgtgtgtgtatgtatacacacagatgtatacacatgtgtgtatgcatacgcagtcttctgtatatatacatatatgtgtatatgtatatgcatatagtcttctatatatacacagatacgtatatatgtatatacatatataggagactatatatatgcacacatatatgtatacatatatgcctatatgtgtgtatatatatacatatgtatatatatgtgtatttttctcatggaatgcttcacaagtttccatgtcatccatgcacaggggccatgctaatattctctgtatcattccaattttagtatatgtgttgccaaagcaagcacaagagacaataaaaataccagaagttgccaggcattgggcagggaaagagatggctgggtggaactaatagtagtgaactattctgtatgatactgtaatggtggatacatgtcattatgcttttgacaaaactcatagagctatgtaacatgaagagtgaaccctaacataaactatggactttagttaataataatatatcaatactggttcagtaacaaatgtaccacaccaatgcaagatgctaataatacaggaaactgagaaagaggggagaggagtgtatgggaactctctgtactttcagctcaattcttctgtaagccaaaaactgctcaaaaaaatctatcaattaaaaaaatacatacatttatgtgcctatacatctactactgtgcatgcaaacaagcaaagttagcaggaataactgttgcattatgtaatcctttctaatattttttggtgtctattttatttattagtaaagaattaccttgaatatggtgagtgttagcaattatgaagctattattatttgttgctgtatacaacattggttgtatccctatgttacacaaacatgacagatattttagctgattaacctataattgcagggttcctaccaatgtaggcaactgcactttaaataccaattcacggtctgaagtatttaggatctaatggcagaaaagctccattttctggctttcttttcattgttcccagtaatattatttgatgtttttattggtggtagactttgattttgtatcattaaagttggatagaacatattttatggaattttacttgaaagggactattagaagcagaatagtctgtacaatttatgaacatgacttagaacacttgtattcatgtgacagtctcattcccatttaatctttaaatcagacattcacaacagaattttagagcattcttgcacacactggtgatatattctaaagaagacaagatgacctggttgtccacaatgacgagtaagcagcaattaactcttctcattacatagctttatgagttttgccaaatgcataatgacatgtatccaccattacagtatcatacagaatagtccactgctacaaaaatgccatgtgctccacctagccatctcttcctctgcccaacgcctgtcaacttctgatatttatatggtctccagtgcttgctttggcaacacatatactaaaattggaacgatacagagaatattagcatgtcccctgtgcagggatgacatggaaatttgtgaagcattccataaaaaattatatatatatatgcatatatgtatatattctctgtagttttttcttttccagagtgtcatatagagtcatgcaccacaattctatacccatgttgcagttacttttacaagaccttggaggatgtgtactgaccacatgcccagatcaggcttcagttccctcaggtacattccagtctcatgatgccatcatttgctagaaagtggcacagagtattaagaaggcagctctagaagaaaaagccttgggccagaatcccaagaaacacttagagcctctataactggaaatataagaccattcaaatacttttgagttttaaatgggcatttatatcttcagaaaactctgagaggcttacttgggccaccattcatagattccccctatggagaagggttaggagctacatatactccagccctcactcttggctcttaaatatgtcttcccagagagggcatgctttcctaatcacatagaagcagcacgggctaggctggcatcaccccctgttgatgacccaaggtattagtctgttctcacactgctaataaagacatactcaagactgggcaatttataatggactcacagttccacatggctgaggaggcctcacgatcatggcagagggcaaaagagaagcaaaggcatgtcttacatggcggcaggcaagagggtgtgtgcaggagaattcccctttagaaaaccatcagatctcgtgaaacttattcactatcaagaaaacagcatgggaaagacctgtccccatgattcaattacttcccatagattcgctcctatgacgtgggaattctgggggctgcaattcaagatgagatttgggtgggaacacagccaaaccgtatcacccaaggaacacatcagtgatcacttctcacacattttcactggagcacacaggctgaactccatgaactgtggtgtcttcattggtcaaatggggataaaggtactaccaccttggaagcctcctgtgaggattaactgatttaacatgtgagtgttcaataaatataagcaggtcctatcctactcatagcctagaattttcacaatgattaaagaagcgtgtaaactggacctcataagtcctcaatagtggatacctttattgctgataaaatttaattagatttatctctcccaccctacatcattctggtccaaagagcaggaactctgtagaactaagtttagtaccaaaagagatttattgaaggtatgccatattctaggcattaaaaaatactactattcattacttaatccttaaaatttctctttgaggttactattttatagtctccatccagatgagcgaattaagcagctttaaaatcatgaattttaacaggaaggacaagaaggaagagggagaagaagaaaaagaggaggaagaagaggaaggggaagaagaatgaaattaatatgtattcttagagtaacctgttaatctaaattaatttggtttatttgagtatatacctaattttcgagtgatttgtagggtttcaaatgtgttagcaaattagtagatatttaatataaatatcataataaaaaacatttgttaaaacatatgggaatttttaagtgatactctatattgcattttatattaatattatatttttaaaataaatttgtaatgttcaaaaacatgtttttctctaaacaaacgaaatacaaagttaacttctttataattctatacctatcctgtggttactatagattaccactgacacaaaacattttttccatactactatttaatacaagaattggaacagactattgatctagttttaacagatttagtgttgtaggtattttgttgaaaaatgatttccatcgatcaagagattgcttttccctcaagggaaatgagcccctgtctaaggtaccaacctcctcataaatagaatttgtagggagttcttatttccccccacgaggatgggatacaggtttaaatcacgattctttatcaaaagaagatttctcaccattagttaaacacaaaacactcagaatatgatatcctgagttttcaagtgtggtgactttccaatgttgttttttttgtttgtttacacacttaggaattttaagaaaaatataactacatgaagactattttttcacagtgggggtattattttcacaataaaaattatccatattattccatcttagaaaatttgagaattatattttataatttttattgtatatcagtttaaagattcttgttaatgggggagagagagggggttgtgtgtgtatgttcaatgaatcagtacaagcttccgatattatcagtctaagtcttgggtggtgtctacctccttgcttcagaagaggcagctctgatggtctcctcaagttccttggccagacccggaagcctgggcagtgtcaccttcctaaataggtctgttctcaagaattaactgctgcttagtgtgacaaataggaaaatgaaacaaagggggtgggggagggcacagatgaaaattctctacccctctacctactcctttcaccatcctcaggggctcctgatacaccagccaatagatctacactatcatttctgatagttttaataacccaaatgggctgaattatctattccaaagatctgtacagtagggtttctcagtttctgcactgtggacattttgggctggatgattctttggtctggagtagggaggggctggggtgctgtcctgtgcattgtgggatgtttagcggtatccctggcctctacccatcagatgccattggcacctcccaaccaaaactgtgcccagatcttgtcaaatgtcctcctggggtagaggaaaaaattaatccccctcaacccattgagagccactccatatatggtaatgcattagtgagaggcagaaaaagggaaagcctggatcatgaaggtaaatcctgtggtgcaactgtctagtgggatgcatttgcatgctctgtttctatgttcctctgttataaggaattaagccttacaagaagagtatgcaactcaaatattagtacctagctgacaaagaatttataactctgaagttacactgtggtagactagtatttcccagtcttcaggggggaacattaattagttctctgaaaacaaaagcttccctggtctctttcctctgaatgtacacgaacatattaaaggtccttgagtatccagtggtaaataaaaggcatttaccattgtttaaggttaaacaaagttctttaaggaaacaagattcttttctaatacccattcaaacccttttgtttccaacaatttgtaaagttgatgaataccatataaaccattccctcaaaatggaaggatttctaggtattctcttatcatagatttccacactaatttaaaatatttacactatcatcttgttactagagtcagatttaattgggactcagggttttacttgagaataatgttttgtgtttgtaaatgatataataatatatataaatatattttttatttatttatttttactatcggttcccattcaatagccatgagtagacttatgggcttagttaactcatatgactcttaatcaatggatcaattgcctgcatcaaaatgtgcttctgagtatttacttatttatgtatgtattttattattattatcatttctaaatacacccagggaactctgcggactgctgaaggagctttggagatatcaataaaagaaaatgatctagcacaattgcatgggcctgaccaataagaacatgccaatacgcattcagagccaagctcatcagcttgctagggcactcagtctggaggcagtctggcctacacagaggctgatgtcttagtggaaatcaggctcagagtcaagtgcaatgcaaagagccagggagaatgttctcctgcaagttcatctttacatgataataacaagacttaattaaaaatcactggtattttctctatttgtttcctaggcagaaagctcaaataccagactgtctggttcaaaattgaacacctggcaaccctaatgatttggtttacacagtgatttatgttgtgtcacagattcagaaatgtggtgtcagtgggggtaggagtgggggaacacagacacattcaggagaaaaagacctttactttcatctttatatgtttaattgggttaaaaaatgtttctcaggaaaaggaaatgttttcatctattattccattttattataggcatgtccatctctttgtcctatcatgtttccgctttttgctttcagtgctaatttccatagctttaacagactctgatgtctatcagatttgattttggtgttcctgacatagggctctgtcctaagtctgtgaaacagctaccatgtttcaatcactgtggcgatatgagtgtgtggtctggagccaaatggctgtttgaattacagctctactatttctcagctgtgtagatgagacacttaatctattttagccttaatttactcagtcataaaatgtggtggtagtgatggtggtggtggtggggggaaataatatctatttgtgaaaaaagtttagccttggcacagtggctcatgcctgtaatcccagcacttttggaggccaagccgggaggattgctggagcccaggagttcaataccagcctgggcaagagtaggactctctaattaaaaaaaaaaaaaaaaatgaaaaaaaatttcttatgagagtgaatgttctcacccctaatatgtgtgggtttcaggataagagtataaatggagcctgaatactctatctaaatatctcaaaattatgaattcccccaacaagttgctgaataaactgtgtgttgtctgcctgccttgacaaacataccttcaacatttaaaggtctgggtttaaatgtagaattctgaggctcctcagtgtcccatgctggaatgtggtggccttgggaaaatggaccttagctttaggcctggccctcctctcttcccaagctcttcttcacactgcaagggcctcccagatgatgcatgaagatcctggcccatatattcagctacatccacatccctagcaaaagggaggctaaggccattcctcaggcctagggcactgcccctggagggaagaccagtggaagatgcctggaaaggccctggaagtagcttcaaggccatttcgatagagaattctgggggcctgaaaacctagagccaaggggtggacctgggctcaggataggcaagtccccttgatccaaggtatcactgtaggaggaagggcagtcagaggagggccagagctgagccttctaatgcacagggcccagagtggagtgaggaacaatgctgggattagacacccaaatctactgaattagcgaagtccaagcaaagtactgcaaacaaggtctggcatatcacaagcaactaataagtgttacttttattattaagcacctactggatgtcaccttttagcactgaggatgtaacaatgaatagaaagtgatcactgctctgggatctgtccctctaatattaggcttctgcaccaacagtttgggctacctgctgtgacagggatatggaagtttgttaggtggagaataaatggaaacccctacctccctggaaggtcaagggaaggtcttacagaggaagccatggctgagctgagatgtgaagggtgaatatgagtttagccatcagatgactggtaaaggtggacagtccagtcaaagacaacaacttactggatacatggaggtcagaaagagcatggcatttagaataactagaaaaaaaaatgtttgttttgtgcagaggcagggtacttaggaggatggcaagtaatgaggttggagaaatgggcaaggaagaacaagatcgtgaatggtgagagtcatttccttagggagctacggatgtcacagtgaccttccacataattcagcatatctgctgcagaggtagccaagaaaccaagattaggacttcagctggacaatgttggcctgctggctcacagggcatggggagcaagttcacataaggcagtagggaagaggaggaaaactgcacacatccagggagattttagtgccagaattccggaaggctttcttccagaaggccctcaacctaactgccacgcctcctctcccacttttttatttagctacctcttatagactcatccttcagaacttagatgaagcattacacttcctccaggaatcccttcctaaattctcattctaattcagaagacattcttttgtatttctgcagtgtctcaaaaagtagattgcacgagacttattaattcattggtcagttttcctagaagagtggtttttaaactttatcatgaattctccaatgacttggagggcttgttgaaacacagatttctgaggcctatccacagactttctgattcagaaggacttagaattttcatatctaacaacttttccgatgaggctgatactgctagtttagggaccacactttgaggaccactgaggaaagagtttcacaagtcagagatttacagtggaggtaccaagcttttctcaagttagtttatcagaagcacaaaccatcaccctctaccaatcattataatgaagaccacttcatttcagtttatgtacaaaaactcatctccacagttatgccaagtgtatgaagacaaagaaacaatatcaggaaaagaggtttatttgattttgaatccttagccccttacacagtgcctgaaacatataagaggcagtgaataaatgcttattgagtgattacataaagagatgaatgggaggctgaggtgagcagattacgaggtcaggatatccagaccatcctggccaacatagtgaaatcccaactctactaaaaatacaaaaattagctgggtgtgatggtgcctgcctgtaaacccagctacccaggaggctgaggcacgagagttgcttgaacccaggaggcggaggttgcagtgagcaccactgcactccagcctggtgacagagcaagactccgtctccaaaaaaaaaaaaaaaaaaacctgttcatatatcttggacatttcaatttcagtgtactccagcagatttctgactgaccacatctgcatctccatgactgagggttttctagaactgtggaaggtccctttgcacaaggcaggctgaatgtgctagggaattaatgttctctaaagcagtcctcagcctgggaaatatggtgagactctgtctctacacaaaaatttttaaaaattagctgggcatagtggtgcatgcctatagtcccaggtattcggaagatcacttgagctcaggagtttgagttggaggctttggtgagctacttttgggagttggagaataactactcctgcttaattgcccttcggtaaaattttgaggcatgttctacacaatgtcccagaaatgcacagcagcattgagctctagttgccccagcagtcacctgcccagctgcatactattttattggcatctttctctcactacttgtgctcaacatctttgctcagggcatgtttccaaaggcatccaaactgaaaaggaggacaaggagctaaggataaaatatagatagatagacagatagatagatagatagatagtctagggagtatggcagagattccagataatgcaaattcagatgcacctgtcaaagtgacaaaaagaagattacaggcaaaagtagcagcagcaaaactggagctggctgtgagtcccccatcctgagtcctgcagttcatgatcttcatcccagatcccagtgtcacaggatctctagggtgttgcttttccagccggaaacctctgaggctggtagcgcctttgcccgaattttgcttgggcctgctgggcttattctgcctactcggcccatcagggtgcacttggctcgcgctaccagcccagatcccacacctgccaagggtgagctaggcacggagcagtgaagggtatgtgagggagctcagggtctggccactgtgcacagccaggctgtggtggggcgggcagcaccaggtgcctgcacaggcgccagctctatgcaaggctccagctgaaccaggcatactgcaaatggcttccgctgtggacgtcagggaacgtggtggcaccccgaagcttggagacgtcaggaacctcagagacccaaagagggtgttacagccctaactcgaggaggccctaggtctgagctccccaaagggctgcagctcttctctccttcccgtcgctggcaatgtggcaagcgaggggttgtgtttcagccctgtttgtgttacaactctttcagtcctgccatctggtgggtctgagttcttgtctggcatccaggaagaatgaggtatgtggacaactggaaggtgagcaaaatggagaggctcttccttgagtgacagaacagctctcaggaaacccatagtgggtagcacctttcctcaggcaggtcgtcctgataagcggctagcgttcagcagagaggggacccatactgggtagctcctttccacaggcaggccatcccgactaagtggaggagacctgaaatggatagttgattcccgcagctgttagtaccgtctgtgttaatctggcagagttagcggtgtttttatgggctcagaagggaggaagtgcatgctgattggtccatgggtagccataggcgggcctggagggagcaccataaattctctctgggccatggactccacccagaaatggcagcctggctcccaggcttcaggctgtccctggcttgaaggtggggtttcaccagggactcgcgcctttctccccaggaccctttctgcctcccgccatcagcatgccatccagggcacccaggctgttcgtgcccaggcccgcaccgagctgaccgcccccgctggcctccctcccacactcgtgagtacccaaagtccggaggggttgaggcgtcagggggctgtcatgtcagcgctgcctcaagggtgcacacacgcggccaggtggcaggagtgcctgggcttagccacaactttgctctgaaatcagagtgggcactgggagtgaggagaggccggagggcgggagcaggcacttctagcctgcagcgacaggtgggcttcccaggcccccaggagtacagggattcctgggtccggagctgtggctgggcgactgcagctccacctgggaactcagggctcccgccccgccaacttggtagggagtgggcctctggcctgctcctggcccccgtcggctccgcacgctgccctggcgcgcctacccctctgcacctggcgtcgtctttgcagcggacgctccagatgggccactgctgccattaccaggtggctgcagctggaggtaattctgcaggccgattgcccaacagagtaggatgggggattcacggagctgagagccaagacatcactttgagactcaaatccacacttcaccctgaactatccaggacactcagagctgccgacatttgctcaataattggtcaatttttgaccgtcactctaaccggaaatgcacatttaaaaactgtaccttcagcagctgctgtggaaagcagtttgacagatcctcaaaaagttaaacaaagaattgctacatgatctaccaatttcactttttggcatatacctaaaagaatttaaaacagggacccaaatagatacttgtacaccaatgttcatagcagcattattcactatagccaaaaggtggaaacaccccaaatggccatcaacagatgaatggataagcgaaatgtagtatatccataagacagaacatcattcagtttaaaaaggaatggaattctgttatatgccatggatgaaccttgaaaacattatgctaagtgcaataacccagacacaaaagggcaaatgttgtatgattccacttatacgaggtaaccagaataggcaaattcatagagacaaaaagtagattacgggtttccaggagctgggacaggggaggatggggcgttattgtttaataggtacagagtttcagtacgggggatgaaaatgttctggaaatggatagtggtgatggttgcacaaaaccgtggatgtaattaacaccactgaatggtatgcttaaaaatggctacagtgataaattacattatgtatattttaccacaattaaaaatgcatgtcttcatactaaaacaggtatcttaaaatgtttacctctgctgccaacgatggggaatgaaaaatcagtctcttgctatcctttcccgtggtgagctttcagctgccacactttctcattctcttccctcaagctgggccagatcacatgggcaggcagaggaaggaagacttgataaaaggtgtaattttgtcctgctgctgcttgtcgcagtatatgctttgtccattttatctgcttatgacccagttatttgctttttctctttatacacttgaggtaaccttggaaatgggctctaaaatctgaactgaaatgaaatggtcttcatgtacccccagtggtgtgatggtttgtgcttctaataaaataatttaagctaagctaagcgtgcatccactataactctctaacttgtgaaatctgtagcttcagaatcatcattcatcatttttgtcttccaagacactaatggaaattaaaataaacaaacctgtccatgttagaaagagaaaagatcctctacagtgacaagtttcacacaaattgcaatatgcataaaatatccaccaggttttaaaacaggtcatccattaagggttcaacagacacaagggagtattgcagttaaaaggtgggtagggtgttgtttaaccaacgttttattaatgaatgagagttcagacggcaaatgatagtctaacaacatcagtgtatatttgtgaagattaaataagactcatgtttcccccgtttggaggtttgcaaacgaaatctggcacaaaatatacaggaagataaactcgagaggaacgtagcctgtcacagtgattgatggggctgcttttcacccaacagtgtttgaaaatgtagatatccttaaataaatgacgccaagtgagccatgccagcctagggaattaagaagacattattgcattttgcagaaacaacataaagcactgctaccaaatttgatggttggaattctatatactttccatgacacctcacgatgtatatgctgcacaagagtgtatggtatcatttttagtaatgaggttaccaaggtgttccaaggtgaggcaaataactttctctgctgtgttcctggaggtgaattttaagactgcaaaatcagcagtatcattttctggaacactttaggaattcacctccacaactttcctttcccccagccccctcagtttagggtactttgaagagggactcaacatatagttgccaaaattgggggtgaggtgaggggatttataatagaaagtacaaagtttagaagtgatttattagcaagagagaaaagtattctcaaatggatgtaaattgtgaagcatttttttggtcaaaatcagcaagttatagcattcaatttgtttgcccatgatatattttgagttaaaaaaataaatactcataggcacataattaatgaaaagagcatagtattctgcatggtattttatcacctgtttctttcacttaacaggaattagtaatatactttgatgctaacaaaacatttttataatatatttagtagttgaaaacaatgctctgtcgtcaatctactttaattcattgttggacatttaacctggccctcccatttatacaaatagcactactgagaccatcattagagccagatcttgttttatatctttaattgtttaattagagcaaatgtctagaagtagaattgctggattcatgtgtcagtaaaaattttaggtcttttgatatgcattcatgcttatatcagcaggattcaagaagcccattttctcactcttttaccaccactgaatattatttaaaaagtggtaccaaggcagggtgtcttggctcaaacttgtaatccaagcactttgggaggctgaggctggaggattgcttaagcccaggagttccagaccagcctgggcaacatagtgagtccccatgtctacaaaaagtaataaatgaataaataaataaccggatgtggtggcatgcaccagtagtcctagctactcaggaggttgaggtgggaagatcacttttgcctgggaggtcaaggttgcagtgagccttgatcacaacactgcactgaagcctgggcaacagagtgagaccttgtctccaaaaaaataagtaaaataaaataaaataataaaatgtaggtaaaaaattgtagtcaaatttgggtatgcaagaaatatttttacttctttattttctttaagtgaaatttgatcttatctcaagccagcaactcaccctttccccacccatctgcactgtcaggaaaagcaatcagtgccattctttatggaacctcctgtcccttgctatggtcactgaggctcctacttgatacctagaaaatgggcaaagatttattacatcatggaggctgctgtgtcagacctcacagccccaggaagatgtgggcagttcattccaacggacaacaggatctttaactagacagagggaccctgttctttgtttttctctccccaacttggggcctaccaggaaatcctagggaccttcatcctcttctcctttcctagccatgggtattttcctctctggcactgccagccctgctccccctttttttttcctagtgtcatttcttttaggagatctggtgtcagtgaaaacaaaagccaggcatgccagctgtctgtaggcaacatccaagtccaagggaaggggaatggggggaggatggtctgcctacttgaaacagaggagccagaaatgaagggaaataaagcacaaataaatacttcaattaagtattttgacctatgtgtatgaatttgtctgtgtatttatagtcaatttatcagtctctctagttagttctaatagatttctttttcattagaacttgcttctcaaaaattatcacattaatactcttttttcgtgtttaaatgcaatccatcttcctggattggtgctatctctggaaagaacacttgtagaacttggatgataatgcttttatatgaccagtcgataatccataattgcagtacattacgatgaccatctatgtcccttttgtcttcactggtggttctcaaagtgtagttcccagatcagtataatcagcatcacctgggaacttgttagacaaattattggtcacaactccagacctactgactcagaaactctggtatcccccttccccccaccaatcagtagtttaacaagcccttcagctgatttcagtacatactaaagtttgaggactgctgctctacatcatcatcaatcataatcacgcactcatcttgctcatgggtactttagggtttccaaaccctttagatgattccaaatcaccaccgtgatttttaggggtaaggttaatgcaacaatacactaaagtcagtgtttaactgcacaaaaactcaccatcatctttctatacccaaagttgtgtctttagaaaaccatttctttaattggcaggcaactccagaattgatcatgtaggaaagcaaaattcattagcacgaactgtacaaaagtttgcacatcaaaaacccaaagcgtctcttctttttataaagatttagttacaaagataattataaagataattatgaaataattatgatttatatgttatataaataatgtaatcaatatttataatagataattataaaataatctttatgtgt
